(19) United States
(12) Patent Application Publication
(10) Pub. No.: US 2015/0299804 A1
(43) Pub. Date: Oct. 22, 2015

(54) BIOMARKERS FOR PREDICTING CLINICAL RESPONSE OF CANCER PATIENTS TO TREATMENT WITH IMMUNOTHERAPEUTIC AGENT

(71) Applicant: BRISTOL-MYERS SQUIBB COMPANY, Princeton, NJ (US)

(72) Inventors: Maksym ARTOMOV, Cambridge, MA (US); Scott D. Chasalow, Pennington, NJ (US); Kevin Daniel Fowler, Cambridge, MA (US); Ruiru Ji, Princeton, NJ (US); Vafa Shahabi, Valley Forge, PA (US); Fadi George Towfic, Cambridge, MA (US); Benjamin James Zeskind, Cambridge, MA (US)

(21) Appl. No.: 14/442,749

(22) PCT Filed: Nov. 14, 2013
(86) PCT No.: PCT/US13/69975

§ 371 Date: May 14, 2015

Related U.S. Application Data
(60) Provisional application No. 61/726,953, filed on Nov. 15, 2012.

(51) Int. Cl. C12Q 1/68; G06F 19/00; C07K 16/28

(52) U.S. Cl. CPC C12Q 1/6886; C07K 16/2818; G06F 19/706; C12Q 2600/106; C12Q 2600/158; C07K 2317/76

(57) ABSTRACT

Provided herein are prognostic and diagnostic methods for predicting likelihood of clinical response of a subject having cancer to treatment with an immunotherapeutic agent. Also provided herein are methods for treating a subject having cancer with an immunotherapeutic agent after determining likelihood of clinical response of the subject to such treatment.

### BACKGROUND

[0001] The National Cancer Institute has estimated that in the United States alone, 1 in 3 people will be struck with cancer during their lifetime. Moreover, approximately 50% to 60% of people contracting cancer will eventually succumb to the disease. The widespread occurrence of this disease underscores the need for improved anticancer regimens for the treatment of malignancy.

[0002] Due to the wide variety of cancers presently observed, numerous anticancer agents have been developed to destroy cancer within the body. These compounds are administered to cancer patients with the objective of destroying or otherwise inhibiting the growth of malignant cells while leaving normal, healthy cells undisturbed. Anticancer agents have been classified based upon their mechanism of action, and are often referred to as chemotherapeutics or immunotherapeutics (agents whose therapeutic effects are mediated by their immuno-modulating properties). The vertebrate immune system requires multiple signals to achieve optimal immune activation; see, e.g., Janeway, Cold Spring Harbor Symp. Quant. Biol., 54:1-14 (1989); and Paul, W. E., ed., Fundamental Immunology, 4th Edition, Raven Press, NY (1998), particularly Chapters 12 and 13, pp. 411-478. Interactions between T lymphocytes (T cells) and antigen presenting cells (APCs) are essential to the immune response. Levels of many cohesive molecules found on T cells and APC's increase during an immune response (Springer et al., Ann. Rev. Immunol., 5:223-252 (1987); Shaw et al., Curr. Opin. Immunol., 1:92-97 (1988); and Hemler, Immunology Today, 9:109-113 (1988)). Increased levels of these molecules may help explain why activated APCs are more effective at stimulating antigen-specific T cell proliferation than are resting APCs (Kaiuchi et al., J. Immunol., 131:109-114 (1983); Kreiger et al., J. Immunol., 135:2937-2945 (1985); McKenzie, J. Immunol., 141:2907-2911 (1988); and Hawrylowicz et al., J. Immunol., 141:4083-4088 (1988)).

[0003] T cell immune response is a complex process that involves cell-cell interactions (Springer et al., Ann. Rev. Immunol., 5:223-252 (1987)), particularly between T and accessory cells such as APCs, and production of soluble immune mediators (cytokines or lymphokines) (Dinarello, New Engl. J. Med., 317:940-945 (1987); and Sallusto, J. Exp. Med., 179:1109-1118 (1997)). This response is regulated by several T-cell surface receptors, including the T-cell receptor complex (Weiss, Ann. Rev. Immunol., 4:593-619 (1986)) and other “accessory” surface molecules (Allison, Curr. Opin. Immunol., 6:414-419 (1994); Springer (1987), supra). Many of these accessory molecules are naturally occurring cell surface differentiation (CD) antigens defined by the reactivity of monoclonal antibodies on the surface of cells (McMichael, ed., Leukocyte Typing Iff, Oxford Univ. Press, Oxford, N.Y. (1987)).

[0004] Early studies suggested that B lymphocyte activation requires two signals (Bretscher, Science, 169:1042-1049 (1970)) and now it is believed that all lymphocytes require two signals for their optimal activation, an antigen specific or clonal signal, as well as a second, antigen non-specific signal. (Janeway, supra). Freeman (J. Immunol., 143:2714-2722 (1989)) isolated and sequenced a cDNA clone encoding a B cell activation antigen recognized by MAb B7 (Freeman, J. Immunol., 139:3260 (1987)). COS cells transfected with this cDNA have been shown to stain by both labeled MAb B7 and MAb BB-1 (Clark, Human Immunol., 16:100-113 (1986); Yokochi, J. Immunol., 128:823 (1981); Freeman et al. (1989), supra; and Freeman et al. (1987), supra). In addition, expression of this antigen has been detected on cells of other lineages, such as monocytes (Freeman et al., (1989) supra).

[0005] T helper cell (Th) antigenic response requires signals provided by APCs. The first signal is initiated by interaction of the T cell receptor complex (Weiss, J. Clin. Invest., 86:1015 (1990)) with antigen presented in the context of major histocompatibility complex (MHC) molecules on the APC (Allen, Immunol. Today, 8:270 (1987)). This antigen-specific signal is not sufficient to generate a full response, and in the absence of a second signal may actually lead to clonal inactivation or anergy (Schwartz, Science, 248:1349 (1990)). The requirement for a second “costimulatory” signal has been demonstrated in a number of experimental systems (Schwartz, supra; Weaver et al., Immunol. Today, 11:49 (1990)).

[0006] CD28 antigen, a homodimeric glycoprotein of the immunoglobulin superfamily (Aruffo et al., Proc. Natl. Acad. Sci., 84:8573-8577 (1987)), is an accessory molecule found on most mature human T cells (Damle et al., J. Immunol., 131:2296-2300 (1983)). Current evidence suggests that this molecule functions in an alternative T cell activation pathway distinct from that initiated by the T-cell receptor complex (June et al., Mol. Cell. Biol., 7:4472-4481 (1987)). Some studies have indicated that CD28 is a counter-receptor for the B cell activation antigen, B7/BB-1 (Linsley et al., Proc. Natl. Acad. Sci. USA, 87:5031-5035 (1990)). The B7 ligands are also members of the immunoglobulin superfamily but have, in contrast to CD28, two Ig domains in their extracellular region, an N-terminal variable (V)-like domain followed by a constant (C)-like domain.

[0007] Delivery of a non-specific costimulatory signal to the T cell requires at least two homologous B7 family members found on APCs, B7-1 (also called B7, B7. 1, or CD80) and B7-2 (also called B7.2 or CD86), both of which can deliver costimulatory signals to T cells via CD28. Costimulation through CD28 promotes T cell activation.

[0008] CD28 has a single extracellular variable region (V)-like domain (Aruffo et al., supra). A homologous molecule, CTLA-4, has been identified by differential screening of a murine cytolytic-T cell cDNA library (Brunet, Nature, 328:267-270 (1987)). CTLA-4 (CD152) is a T cell surface molecule and also a member of the immunoglobulin (Ig) superfamily, comprising a single extracellular Ig domain. Researchers have reported the cloning and mapping of a gene for the human counterpart of CTLA-4 (Dariavach et al., Eur. J. Immunol., 18:1901-1905 (1988)) to the same chromosomal region (2q33-34) as CD28 (Lafage-Pochitaloff et al., Immunogenetics, 31:198-201 (1990)). Sequence comparison between this human CTLA-4 and CD28 proteins reveals significant homology of sequence, with the greatest degree of homology in the juxtamembrane and cytoplasmic regions (Brunet et al. (1988), supra; Dariavach et al. (1988), supra).

[0009] The CTLA-4 is inducibly expressed by T cells. It binds to the B7-family of molecules (primarily CD80 and CD86) on APCs (Chambers et al., Ann. Rev. Immunol., 19:565-594 (2001)). When triggered, it inhibits T-cell proliferation and function. Mice genetically deficient in CTLA-4 develop lymphoproliferative disease and autoimmunity (Tivol et al., Immunity, 3:541-547 (1995)). In pre-clinical models, CTLA-4 blockade also augments anti-tumor immunity (Leach et al., Science, 271:1734-1736 (1996); and van Elsas et al., J. Exp. Med., 190:355-366 (1999)). These findings led to the development of antibodies that block CTLA-4 for use in cancer immunotherapy.

[0010] Blockade of CTLA-4 by a monoclonal antibody leads to the expansion of all T cell populations, with activated CD4⁺ and CD8⁺ T cells mediating tumor cell destruction (Melero et al., Nat. Rev. Cancer, 7:95-106 (2007); and Wolchok et al., The Oncologist, 13 (Suppl. 4):2-9 (2008)). The antitumor response that results from the administration of anti-CTLA-4 antibodies is believed to be due to an increase in the ratio of effector T cells to regulatory T cells within the tumor microenvironment, rather than simply from changes in T cell populations in the peripheral blood (Quezada et al., J. Clin. Invest., 116:1935-1945 (2006)). One such agent is ipilimumab.

[0011] Ipilimumab (previously MDX-010; Medarex Inc., marketed by Bristol-Myers Squibb as YERVOY™) is a fully human anti-human CTLA-4 monoclonal antibody that blocks the binding of CTLA-4 to CD80 and CD86 expressed on antigen presenting cells, thereby, blocking the negative down-regulation of the immune responses elicited by the interaction of these molecules. Initial studies in patients with melanoma showed that ipilimumab could cause objective durable tumor regressions (Phan et al., Proc. Natl. Acad. Sci. USA, 100:8372-8377 (2003)). Also, reductions of serum tumor markers such as CA125 and PSA were seen for some patients with ovarian or prostate cancer, respectively (Hodi et al., Proc. Natl. Acad. Sci. USA, 100:4712-4717 (2003)). Ipilimumab has demonstrated antitumor activity in patients with advanced melanoma (Weber et al., J. Clin. Oncol., 26:5950-5956 (2008); Weber, Cancer Immunol. Immunother., 58:823-830 (2009)). In addition, in a number of phase II and two phase III clinical trials, ipilimumab was shown to increase the overall survival in advanced melanoma patients (Hodi, F. S. et al., “Improved survival with ipilimumab in patients with metastatic melanoma”, New Engl. J. Med., 363:711-723 (2010), and Robert, C. et al., “Ipilimumab plus dacarbazine for previously untreated metastatic melanoma”, New Engl. J. Med., 364:2517-2526 (2011)). Treatment with ipilimumab, however, can result in adverse events in some patients and individual survival outcome may be different.

[0012] Provided herein are biomarkers that may be used to predict clinical response of patients to treatment with an immunotherapeutic agent, for example, an anti-CTLA4 antibody such as ipilimumab, prior to receiving the agent, and methods of using the biomarkers for treatment with the immunotherapeutic agent, or for predicting clinical response of a patient treated with the immunotherapeutic agent.

### SUMMARY

[0013] Provided herein are methods for treating a subject having cancer with an immunotherapeutic agent, comprising (a) determining expression level of at least one gene in a blood sample obtained from the subject, wherein the at least one gene is selected from a first group of genes as listed in Table 2 and a second group of genes as listed in Table 3; (b) determining likelihood of clinical response of the subject to the treatment based on the expression level of the at least one gene in the blood sample, wherein the expression level of the at least one gene selected from the first group of genes is positively correlated with the likelihood of clinical response, and wherein the expression level of the at least one gene selected from the second group of genes is negatively correlated with the likelihood of clinical response; and (c) administering to the subject a therapeutically effective amount of the immunotherapeutic agent for treating the cancer.

[0014] Also provided herein are methods for predicting likelihood of clinical response of a subject having cancer to treatment with an immunotherapeutic agent, comprising (a) obtaining a blood sample from the subject before the treatment, (b) determining expression level of at least one gene in the blood sample, wherein the at least one gene is selected from a first group of genes as listed in Table 2 and a second group of genes as listed in Table 3; (c) determining likelihood of clinical response to the treatment based on the expression level of the at least one gene in the blood sample, wherein the expression level of the at least one gene selected from the first group of genes is positively correlated with the likelihood of clinical response, and wherein the expression level of the at least one gene selected from the second group of genes is negatively correlated with the likelihood of clinical response.

[0015] Also provided herein are methods for determining whether to treat a subject having cancer with a immunotherapeutic agent, comprising (a) obtaining a blood sample from the subject, (b) determining expression level of at least one gene in a blood sample obtained from the subject, wherein the at least one gene is selected from a first group of genes as listed in Table 2 and a second group of genes as listed in Table 3; (c) determining likelihood of clinical response to the treatment based on the expression level of the at least one gene in the blood sample, wherein the expression level of the at least one gene selected from the first group of genes is positively correlated with the likelihood of clinical response, and wherein the expression level of the at least one gene selected from the second group of genes is negatively correlated with the likelihood of clinical response; and (d) determining whether to treat the subject having cancer with the immunotherapeutic agent based on the likelihood of clinical response.

[0016] Also provided herein are methods for treating a subject having cancer with an immunotherapeutic agent, comprising (a) determining expression levels of a first gene and a second gene in a blood sample obtained from the subject, wherein the first gene is IL2RB and a second gene is selected from ASGR1 and ASGR2; (b) determining likelihood of longer overall survival of the subject following the treatment based on the expression levels of the first gene and the second gene in the blood sample, wherein the expression levels of the first gene and the second gene are used to calculate a score according to formula:

Score=−C₁*X_{first gene}+C₂*X_{second gene},

wherein X_{first gene} and X_{second gene} are normalized mRNA expression levels of the first and the second gene, respectively, and C1 and C2 are each, independently, a number ranging from 0.01 to 3, wherein the score is negatively correlated with the likelihood of longer overall survival; and (c) administering to the subject a therapeutically effective amount of the immunotherapeutic agent for treating the cancer.

[0017] Also provided herein are methods for predicting likelihood of longer overall survival of a subject having cancer following treatment with an immunotherapeutic agent, comprising: (a) obtaining a blood sample from the subject before the treatment; (b) determining expression levels of a first gene and a second gene in the blood sample obtained from the subject, wherein the first gene is IL2RB and a second gene is selected from ASGR1 and ASGR2; and (c) determining likelihood of longer overall survival of the subject following the treatment based on the expression levels of the first gene and the second gene in the blood sample, wherein the expression levels of the first gene and the second gene are used to calculate a score according to formula:

Score=−C₁*X_{first gene}+C₂*X_{second gene},

wherein X_{first gene} and X_{second gene} are normalized mRNA expression levels of the first and the second gene, respectively, and C1 and C2 are each, independently, a number ranging from 0.01 to 3, wherein the score is negatively correlated with the likelihood of longer overall survival.

[0018] Also provided herein are methods for determining whether to treat a subject having cancer with a immunotherapeutic agent, comprising: (a) obtaining a blood sample from the subject; (b) determining expression levels of a first gene and a second gene in the blood sample obtained from the subject, wherein the first gene is IL2RB and a second gene is selected from ASGR1 and ASGR2; and (c) determining likelihood of longer overall survival of the subject following the treatment based on the expression levels of the first gene and the second gene in the blood sample, wherein the expression levels of the first gene and the second gene are used to calculate a score according to formula:

Score=−C₁*X_{first gene}+C₂*X_{second gene},

[0019] wherein X_{first gene} and X_{second gene} are normalized mRNA expression levels of the first and the second gene, respectively, and C1 and C2 are each, independently, a number ranging from 0.01 to 3, wherein the score is negatively correlated with the likelihood of longer overall survival; and (d) determining whether to treat the subject with the immunotherapeutic agent based on the likelihood of longer overall survival.

[0020] Also provided herein are kits for use for the methods disclosed herein. The kits may comprise one or more reagents for determining expression level of at least one gene in a blood sample, wherein the at least one gene is selected from a first group of genes as listed in Table 2 and a second group of genes as listed in Table 3.

[0021] Also provided herein are kits for use for the methods disclosed herein. The kits may comprise one or more reagents for determining expression levels of a first gene and a second gene in a blood sample, wherein the first gene is IL2RB and a second gene is selected from ASGR1 and ASGR2.

TABLE 2
First group of genes

| | | |
|---|---|---|
| IL2RB | PMS2L11 | CCND3 |
| KLRK1 | ZMYND11 | TRATRD |
| G3BP | TTC17 | ZAP70 |
| PPP1R16B | CLDN15 | ADA |
| CLIC3 | TBX21 | LOC130074 |
| PRF1 | LUC7L2 | GFOD1 |
| SPON2 | CAT | HLA-A/// |
| | | HLA-H/// |
| | | LOC642047 /// |
| | | LOC649853 /// |
| | | LOC649864 |
| HOP | IMP3 | CECR7 |
| GNLY | CD2 | C7ORF24 |
| TMEM161A | GZMA | ZNF364 |
| PRKCH | SPCS2 | ID2 |
| RUNX3 | RPA2 | KLRD1 |
| GZMB | SLC25A5 | SH2D2A |
| CCND2 | CHST12 | MATK |
| NKG7 | MNAB | CDC25B |
| ARL2BP | GPR56 | GIMAP4 |
| CCL4 | TXNIP | EOMES |

TABLE 3
Second group of genes

| | | |
|---|---|---|
| ASGR1 | ING2 | TSPO |
| ASGR2 | HOMER3 | SERTAD3 |
| CENTA2 | RAB31 | SULT1A1 |
| PGLS | ARF5 | S100A6 |
| CEBPA | IL1RN | STX10 |
| ZBP1 | LILRA5 | IFI6 |
| MAPBPIP | PYCARD | C16ORF68 |
| CEACAM3 | HPSE | |

### BRIEF DESCRIPTION OF THE DRAWINGS

[0022] FIG. 1. Kaplan-Meier estimates of overall survival (OS) for patients split into 2 groups based on the two-gene signature (IL2RB+ASGR2): training cohort (Panel A), test cohort (Panel B), and both cohorts pooled (Panel C). IL2RB and ASGR2 were identified by applying two different methods to the training cohort: multivariable Cox PH regression with elastic-net penalties, and unregularized univariate Cox PH regression coupled with evaluation of 2- and 3-gene combinations. Once genes were identified, coefficients were estimated using unregularized Cox PH regression on the training cohort, and a classification threshold was selected. Finally, the selected genes, coefficients, and thresholds were applied to the test cohort and to both cohorts pooled.

[0023] FIG. 2. Combining the two-gene signature with prognostic factor baseline LDH in the training cohort (Panel A), test cohort (Panel B), both cohorts pooled (Panel C), and both cohorts pooled using two thresholds (Panel D). Coefficients were estimated using Cox PH regression in the training cohort alone. They were then applied to the training cohort, test cohort, and both cohorts pooled to obtain patient scores. The threshold for panels A-C was determined using threshold optimization in the training cohort alone, then applying this threshold to the training cohort, test cohort, and both cohorts pooled. The two thresholds used in panel D were determined using threshold optimization on both cohorts pooled together. Time-dependent ROC curves at 12 months for the training cohort (Panel E), test cohort (Panel F), and both cohorts pooled (Panel G) are presented for both the two-gene signature (red) and the three-factor signature (black), along with the relevant AUCs. The stars indicate the points on the ROC curve corresponding to the selected thresholds.

[0024] FIG. 3. Functional and enrichment analysis yields insights into the biological mechanisms underlying the two-gene signature's association with OS in advanced metastatic melanoma patients receiving ipilimumab. Network analysis of genes (red) correlated with IL2RB (Panel A) suggests a role for EOMES in connecting IL2RB with the genes significantly correlated with it, as well as with CTLA-4 itself. For genes found to be associated with OS (Panel B, row headings) the relative expression of each gene across cell types (Panel B, columns) in the DMAP¹⁸ data is shown in a heat map. This analysis suggests roles for NK and T cells (Panel B, upper left) and B cells (Panel B, middle) in genes positively associated with OS, and a role for myeloid cells (Panel B, lower right) in genes negatively associated with OS. The genes and biological mechanisms (Panel C) suggest that the two-gene signature may represent a balance of anti-tumor lymphocyte-driven functions and pro-tumor myeloid-driven functions.

[0025] FIG. 4. Time-dependent ROC curves at 12 months comparing the two-gene signature (IL2RB+ASGR2) (black) with the three-gene signatures (red) (IL2RB+ASGR2+ZBP1), (IL2RB+ASGR2+CAT), and (IL2RB+ASGR2+ASGR1).

[0026] FIG. 5. Boxplot summarizing the distribution of normalized expression levels for genes ASGR1, ASGR2, and IL2RB in the training and test cohorts pooled. Mean expression of ASGR2 was 1.54-fold higher than ASGR1, and the difference was significant by a paired t-test (P=1.32×10⁻⁶⁹).

[0027] FIG. 6. Kaplan-Meier estimates of OS, and log-rank test p-values, for patients split into 2 groups based on the two-gene signature, IL2RB+ASGR1: training cohort (Panel A), test cohort (Panel B), and both cohorts pooled (Panel C). The results are comparable to those achieved by IL2RB and ASGR2 (FIG. 1).

[0028] FIG. 7. Estimation of classification threshold(s) using the log-rank test chi-square statistic for (A) two-gene signature (IL2RB+ASGR2) in training cohort, (B) three-factor signature (IL2RB+ASGR2+LDH) in training cohort, and (C) three-factor signature (IL2RB+ASGR2+LDH) in pooled cohort (two thresholds).

[0029] FIG. 8. Analysis of EOMES by qPCR yielded a highly significant Kaplan-Meier plot (log-rank p=6.86×10⁻⁸).

[0030] The patent or application file contains at least one drawing executed in color. Copies of this patent or patent application publication with color drawing(s) will be provided by the Office upon request and payment of the necessary fee.

### DETAILED DESCRIPTION

[0031] The methods described herein are based on certain gene expression signatures. The gene expression signatures may be used as biomarkers, e.g., prognostic, predictive biomarkers for clinical efficacy and/or safety.

[0032] Provided herein are methods for treating a subject having cancer with an immunotherapeutic agent, comprising (a) determining expression level of at least one gene in a blood sample obtained from the subject, wherein the at least one gene is selected from a first group of genes as listed in Table 2 and a second group of genes as listed in Table 3; (b) determining likelihood of clinical response of the subject to the treatment based on the expression level of the at least one gene in the blood sample, wherein the expression level of the at least one gene selected from the first group of genes is positively correlated with the likelihood of clinical response, and wherein the expression level of the at least one gene selected from the second group of genes is negatively correlated with the likelihood of clinical response; and (c) administering to the subject a therapeutically effective amount of the immunotherapeutic agent for treating the cancer.

[0033] Also provided herein are methods of predicting likelihood of clinical response of a subject having cancer to treatment with an immunotherapeutic agent, comprising (a) obtaining a blood sample from the subject before the treatment, (b) determining expression level of at least one gene in the blood sample, wherein the at least one gene is selected from a first group of genes as listed in Table 2 and a second group of genes as listed in Table 3; (c) determining likelihood of clinical response of the subject to the treatment based on the expression level of the at least one gene in the blood sample, wherein the expression level of the at least one gene selected from the first group of genes is positively correlated with the likelihood of clinical response, and wherein the expression level of the at least one gene selected from the second group of genes is negatively correlated with the likelihood of clinical response.

[0034] Also provided herein are methods for determining whether to treat a subject having cancer with a immunotherapeutic agent, comprising (a) obtaining a blood sample from the subject, (b) determining expression level of at least one gene in a blood sample obtained from the subject, wherein the at least one gene is selected from a first group of genes as listed in Table 2 and a second group of genes as listed in Table 3; (c) determining likelihood of clinical response of the subject to the treatment based on the expression level of the at least one gene in the blood sample, wherein the expression level of the at least one gene selected from the first group of genes is positively correlated with the likelihood of clinical response, and wherein the expression level of the at least one gene selected from the second group of genes is negatively correlated with the likelihood of clinical response; and (d) determining whether to treat the subject with the immunotherapeutic agent based on the likelihood of clinical response.

[0035] Also provided herein are methods for treating a subject having cancer with an immunotherapeutic agent, comprising (a) determining expression levels of a first gene and a second gene in a blood sample obtained from the subject, wherein the first gene is IL2RB and a second gene is selected from ASGR1 and ASGR2; (b) determining likelihood of longer overall survival of the subject following the treatment based on the expression levels of the first gene and the second gene in the blood sample, wherein the expression levels of the first gene and the second gene are used to calculate a score according to formula:

Score=−C₁*X_{first gene}+C₂*X_{second gene},

wherein X_{first gene} and X_{second gene} are normalized mRNA expression levels of the first and the second gene, respectively, and C1 and C2 are each, independently, a number ranging from 0.01 to 3, wherein the score is negatively correlated with the likelihood of longer overall survival; and (c) administering to the subject a therapeutically effective amount of the immunotherapeutic agent for treating the cancer.

[0036] Also provided herein are methods of predicting likelihood of longer overall survival of a subject having cancer following treatment with an immunotherapeutic agent, comprising: (a) obtaining a blood sample from the subject before the treatment; (b) determining expression levels of a first gene and a second gene in the blood sample obtained from the subject, wherein the first gene is IL2RB and a second gene is selected from ASGR1 and ASGR2; and (c) determining likelihood of longer overall survival of the subject following the treatment based on the expression levels of the first gene and the second gene in the blood sample, wherein the expression levels of the first gene and the second gene are used to calculate a score according to formula:

Score=−C₁*X_{first gene}+C₂*X_{second gene},

wherein X_{first gene} and X_{second gene} are normalized mRNA expression levels of the first and the second gene, respectively, and C1 and C2 are each, independently, a number ranging from 0.01 to 3, wherein the score is negatively correlated with the likelihood of longer overall survival.

[0037] Also provided herein are methods for determining whether to treat a subject having cancer with a immunotherapeutic agent, comprising: (a) obtaining a blood sample from the subject; (b) determining expression levels of a first gene and a second gene in the blood sample obtained from the subject, wherein the first gene is IL2RB and a second gene is selected from ASGR1 and ASGR2; and (c) determining likelihood of longer overall survival of the subject following the treatment based on the expression levels of the first gene and the second gene in the blood sample, wherein the expression levels of the first gene and the second gene are used to calculate a score according to formula:

Score=−C₁*X_{first gene}+C₂*X_{second gene},

[0038] wherein X_{first gene} and X_{second gene} are normalized mRNA expression levels of the first and the second gene, respectively, and C1 and C2 are each, independently, a number ranging from 0.01 to 3, wherein the score is negatively correlated with the likelihood of longer overall survival; and (d) determining whether to treat the subject with the immunotherapeutic agent based on the likelihood of longer overall survival.

[0039] Also provided herein are kits for use for the methods disclosed herein. The kits may comprise one or more reagents for determining expression level of at least one gene in a blood sample, wherein the at least one gene is selected from a first group of genes as listed in Table 2 and a second group of genes as listed in Table 3.

[0040] Also provided herein are kits for use for the methods disclosed herein. The kits may comprise one or more reagents for determining expression levels of a first gene and a second gene in a blood sample, wherein the first gene is IL2RB and a second gene is selected from ASGR1 and ASGR2.

[0041] The term “treating” or “treatment” refers to administering an immunotherapeutic agent described herein to a subject that has cancer, or has a symptom of cancer, or has a predisposition toward cancer, with the purpose to cure, heal, alleviate, relieve, alter, remedy, ameliorate, improve, or affect cancer, the symptoms of cancer, or the predisposition toward cancer.

[0042] The terms “patient” or “subject” are used interchangeably and refer to mammals such as human patients and non-human primates, as well as experimental animals such as rabbits, rats, and mice, and other animals. Animals include all vertebrates, e.g., mammals and non-mammals, such as sheep, dogs, cows, chickens, amphibians, and reptiles.

[0043] The term “immunotherapeutic agent” means an agent that may enhance or alter immune response to a disease or disorder such as cancer. The term “immune response” refers to the concerted action of immune cells, including lymphocytes, antigen presenting cells, phagocytic cells, and granulocytes, and soluble macromolecules produced by the above cells or the liver (including antibodies, cytokines, and complement), that results in selective damage to, destruction of, or elimination from the human body of invading pathogens, cells or tissues infected with pathogens, or cancerous cells. An immunotherapeutic agent may block immuno-regulatory proteins on immune cells, such as cytotoxic T lymphocyte antigen-4 (CTLA-4), Programmed Death 1 (PD-1), PD-1 ligand 1 (PD-L1), OX40, KIR (Killer-cell Immunoglobulin-Like Receptor), or CD137. The immunotherapeutic agent may be, for example, an anti-CTLA-4 antibody, an anti-PD-1 antibody, an anti-PD-L1 antibody, an anti-KIR antibody, an OX40 agonist, a CD137 agonist, IL21 or other cytokines. In some embodiments, the immunotherapeutic agent may be an anti-CTLA-4 antibody, such as ipilimumab or tremelimumab.

[0044] The term “effective amount” refers to an amount of an immunotherapeutic agent described herein effective to “treat” a disease or disorder in a subject. In the case of cancer, the effective amount may cause any of the changes observable or measurable in a subject as described in the definition of “treating” and “treatment” above. For example, the effective amount can reduce the number of cancer or tumor cells; reduce the tumor size; inhibit or stop tumor cell infiltration into peripheral organs including, for example, the spread of tumor into soft tissue and bone; inhibit and stop tumor metastasis; inhibit and stop tumor growth; relieve to some extent one or more of the symptoms associated with the cancer, reduce morbidity and/or mortality; improve quality of life; increase or prolong overall survival; or a combination of such effects. In some embodiments, an effective amount may be an amount sufficient to decrease the symptoms of the cancer, or an amount sufficient to prolong overall survival. Efficacy in vivo can, for example, be measured by assessing the duration of survival (e.g. overall survival), time to disease progression (TTP), the response rates (RR), duration of response, and/or quality of life. Effective amounts may vary, as recognized by those skilled in the art, depending on route of administration, excipient usage, and co-usage with other agents.

[0045] The term “clinical response” refers to positive clinical outcome of a patient to the treatment defined above, and may be expressed in terms of various measures of clinical outcome. Positive clinical outcome may be considered as an improvement in any measure of patient status, including those measures ordinarily used in the art, such as tumor regression, a decrease in tumor (or lesion) size or growth, a decrease in tumor (or lesion) burden, an increase in the duration of Recurrence-Free interval (RFI), an increase in the time of Progression Free Survival (PFS), an increase in the time of Overall Survival (OS) (from treatment to death), an increase in the time of Disease-Free Survival (DFS), an increase in the duration of Distant Recurrence-Free Interval (DRFI), and/or an increase in the duration of response, and the like. Clinical response may be a complete or partial response, or stable or controlled disease progression. Clinical response may be measured, for example, at 2-4 weeks, 4-8 weeks, 8-12 weeks, 12-16 weeks, 4-6 months, 6-9 months, 9 months to 1 year, 1-2 years, 2-5 years, 5-10 years or longer, from initiation of treatment. For example, clinical response may be measured at week 8, 12, 16, 20, 24, or 36, survival at one year, 18 months, 2 years, 3 years, 4 years, 5 years, or 10 years, from initiation of treatment.

[0046] In some embodiments of the methods described herein, the likelihood of clinical response may be expressed in terms of the likelihood of an increase in the time of survival, such as longer overall survival, as compared to some patients, for example, a control or test patient group; patients who have a higher or lower expression level of a gene than the subject; patients who have a higher or lower score based on a formula and expression level of one or more genes; other patients treated with the immunotherapeutic agent; patients not treated with the immunotherapeutic agent; or patients treated with a different anti-cancer agent or procedure (e.g. surgical procedure). In some embodiments of the methods described herein, clinical response is expressed in terms of longer overall survival as compared to patients receiving the immunotherapeutic agent, e.g., ipilimumab or tremelimumab, who have a higher or lower expression level of a gene than the subject; or patients receiving the immunotherapeutic agent, e.g., ipilimumab or tremelimumab, who have a higher or lower score based on a formula and expression level of one or more genes. In some embodiments the term “longer overall survival” may mean overall survival longer than 6, 8, 9, 10, 12, or 18 months, or longer than 2, 3, 4, 5, 6, 7, 8, 9, 10, 12, 15, or 20 years. In some embodiments, “longer overall survival” may mean overall survival longer than 10, 20, 30, 40, 50, or 60 months.

[0047] In some embodiments, “likelihood of clinical response” may mean higher probability of survival at certain time points, for example, at 6, 8, 9, 10, 12, 18, 20, 30, 40, 50, or 60 months, or 1 year, 2 years, 3 years, 4 years, 5 years, 6 years, 10 years, or more than 10 years, from initiation of treatment, as compared to some patients, for example, a control or test patient group; patients who have a higher or lower expression level of a gene than the subject; patients who have a higher or lower score based on a formula and expression level of one or more genes; other patients treated with the immunotherapeutic agent; patients not treated with the immunotherapeutic agent; or patients treated with a different anti-cancer agent or procedure.

[0048] In some embodiments, the likelihood of clinical response may be expressed in terms of likelihood of an increase in the time of progression free survival (PSF). In some embodiments, “likelihood of clinical response” may mean the likelihood of an increase in the time of PSF as compared to some patients, for example, a control or test patient group; patients who have a higher or lower expression level of a gene than the subject; patients who have a higher or lower score based on a formula and expression level of one or more genes; a group of other patients treated with the immunotherapeutic agent; patients not treated with the immunotherapeutic agent; or patients treated with a different anti-cancer agent or procedure. In some embodiments, “likelihood of clinical response” may mean higher probability of PSF at certain time points, for example, at 1 year, 18 months, 2 years, 3 years, 5 years, 10 years, or more than 10 years, from initiation of treatment, as compared to some patients, for example, a control or test patient group; patients who have a higher or lower expression level of a gene than the subject; patients who have a higher or lower score based on a formula and expression level of one or more genes; other patients treated with the immunotherapeutic agent; patients not treated with the immunotherapeutic agent; or patients treated with a different anti-cancer agent.

[0049] The term “advanced cancer” means cancer that is no longer localized to the primary tumor site, or a cancer that is Stage III or IV according to the American Joint Committee on Cancer (AJCC). In some embodiments, the subject may have advanced cancer, such as advanced melanoma. Advanced melanoma may be, for example, metastatic melanoma, or stage III or IV melanoma, such as unresectable stage III or IV melanoma.

[0050] In some embodiments of the methods described herein, a blood sample may be obtained from the subject having cancer, and the expression level of at least one gene in the blood sample may be determined. The at least one gene may be selected from the genes listed in the first group of genes as listed in Table 2, wherein the expression level of the at least one gene is positively correlated with the likelihood of clinical response. For example, the at least one gene may be selected from IL2RB, KLRK1, G3BP, PPP1R16B, CLIC3, PRF1, SPON2, HOP, GNLY, TMEM161A, PRKCH, RUNX3, EOMES, SLC25A5, GZMB, IMP3, and ZAP70. It may be determined that the subject may have a high likelihood of clinical response, for example, longer overall survival, if the expression level of the at least one gene is higher than a predetermined value.

[0051] In some embodiments, the at least one gene may be selected from the genes listed in the second group of genes as listed in Table 3, wherein the expression level of the at least one gene is negatively correlated with the likelihood of clinical response. For example, the at least one gene may be selected from ASGR1, ASGR2, CENTA2, PGLS, MAPBPIP, STX10, C16ORF68, and RAB31. It may be determined that the subject may have a high likelihood of clinical response, for example, longer overall survival, if the expression level of the at least one gene is lower than a predetermined value.

[0052] In some embodiments, the expression level of at least two genes in the blood sample may be determined, and the likelihood of clinical response may be predicted based on the expression level of the at least two genes in the blood sample. The at least two genes may be selected from the genes listed in Tables 2 and 3. In some embodiments, the first gene of the at least two genes may be selected from the first group of genes as listed in Table 2, and a second gene of the at least two genes may be selected from the second group of genes as listed in Table 3. For example, the first gene may be selected from IL2RB, KLRK1, G3BP, PPP1R16B, CLIC3, PRF1, SPON2, HOP, GNLY, TMEM161A, PRKCH, RUNX3, EOMES, SLC25A5, GZMB, IMP3, and ZAP70. In some embodiments, the first gene may be IL2RB.

[0053] In some embodiments, the second gene of the at least two genes may be selected from ASGR1, ASGR2, CENTA2, PGLS, MAPBPIP, STX10, C16ORF68, and RAB31. For example, the second gene may be selected from ASGR1 and ASGR2.

[0054] In some embodiments, the at least two genes may be selected from the pairs of genes (two-gene signatures) listed in Tables 7 and 10 (see the Example section). In some embodiments, the first gene may be IL2RB and the second gene may be ASGR2. In some embodiments, the first gene may be IL2RB and the second gene may be ASGR1.

[0055] In some embodiments, the expression level of at least three genes in the blood sample may be determined, and the likelihood of clinical response may be predicted based on the expression level of the at least three genes in the blood sample. The at least three genes may be selected from the genes listed in Tables 2 and 3. A first gene of the at least three genes may be selected from the first group of genes as listed in Table 2. A second gene of the at least three genes may be selected from the second group of genes as listed in Table 3. In some embodiments, the at least three genes may be selected from three-gene groups (three-gene signatures) listed in Table 8 (see the Example section).

[0056] In some embodiments of the methods described herein, determining the likelihood of clinical response may comprise subjecting the expression level of the at least two genes to a formula to calculate a score, wherein the formula may be pre-determined by statistical analysis of (a) clinical response of a plurality of patients having the cancer to treatment with the immunotherapeutic agent and (b) the expression level of the at least two genes in pre-treatment blood samples from the plurality of patients. For example, coefficients may be calculated for each gene based on the clinical response and the gene expression level in the pre-treatment blood samples. The statistical analysis may be performed with any statistical method that is suitable for analyzing gene expression data, for example, Cox proportional-hazards (PH) regression.

[0057] In some embodiments, the formula for calculating the score is

Score=−C₁*X_{first gene}+C₂*X_{second gene},

[0058] wherein X_{first gene} and X_{second gene} may be expression level of the first and the second gene, respectively, and C1 and C2 may be, independently, pre-determined values. For example, C1 and C2 may be, independently, pre-determined coefficients of the first and the second gene, respectively, based on gene expression data obtained from pre-treatment blood samples from a patient group. For example, C1 and C2 may be each, independently, a number ranging from 0.01 to 3, wherein the score may be negatively correlated with the likelihood of survival.

[0059] In some embodiments, C₁ may range from 0.1 to 2.5, from 0.2 to 1.8, or from 0.3 to 1.4. In some embodiments, C₁ may be about 1.3.

[0060] In some embodiments, C₂ may range from 0.1 to 1.2, from 0.1 to 1.0, or from 0.2 to 0.8. In some embodiments, C₂ may be about 0.7 to 0.8.

[0061] In some embodiments, X_{first gene} and X_{second gene} may be mRNA expression level of the first and the second gene, respectively. For example, X_{first gene} and X_{second gene} may be mRNA expression level of IL2RB and ASGR2, respectively, or X_{first gene} and X_{second gene} may be mRNA expression level of IL2RB and ASGR1, respectively. The mRNA expression level may be normalized. In some embodiments, where the mRNA expression level is measured by microarray, the mRNA expression level may be normalized using a standard robust multichip average (RMA) approach.

[0062] In some embodiments, X_{first gene} and X_{second gene} may be mRNA expression level of IL2RB and ASGR2, respectively, C₁ may be about 1.3, and C₂ may be about 0.7 to 0.8.

[0063] The score described above may be compared to a predetermined threshold. A score that is lower than the threshold may be indicative of high likelihood of clinical response, for example, longer overall survival, or higher probability of survival at a time point, while a score that is higher than the threshold may be indicative of low likelihood of clinical response, for example, shorter overall survival, or lower probability of survival at a time point, as compared to a selected or control group of patients, such as, patients treated with the immunotherapeutic agent, patients not treated with the immunotherapeutic agent, or patients treated with a different anti-cancer agent or procedure.

[0064] The expression level of the at least one gene may be measured by at least one method selected from microarray, quantitative polymerase chain reaction (qPCR), and flow cytometry. “Microarray” refers to an ordered arrangement of hybridizable array elements, preferably polynucleotide probes, on a substrate.

[0065] The immunotherapeutic agent may be an antibody. In some embodiments, the immunotherapeutic agent may be an anti-CTLA4 antibody, such as a human or humanized or chimeric anti-CTLA4 antibody. In some embodiments, the immunotherapeutic agent may be ipilimumab or tremelimumab. In some embodiments, the immunotherapeutic agent may be ipilimumab

[0066] In some embodiments, the subject may have cancer selected from melanoma; prostate cancer, prostatic neoplasms, adenocarcinoma of the prostate; lung cancer, e.g., small cell lung cancer and non-small cell lung cancer; ovarian cancer; gastric cancer; adenocarcinoma of the gastric and gastro-esophageal junction; gastrointestinal stromal tumor; glioblastoma; cervical cancer; adenocarcinoma; breast cancer, invasive adenocarcinoma of the breast; pancreatic cancer; duct cell adenocarcinoma of the pancreas; sarcoma, such as chondrosarcoma, clear cell sarcoma of the kidney, endometrial stromal sarcoma, Ewing's sarcoma, osteosarcoma, peripheral primitive neuroectodermal tumor, ovarian sarcoma, soft tissue sarcoma, uterine sarcoma, adult soft tissue sarcoma, and synovial sarcoma; transitional cell carcinoma; urothelial carcinoma; Wilm's tumor and neuroblastoma; lymphoma; leukemia; ocular melanoma, intraocular melanoma, cutaneous melanoma; and kidney cancer. In some embodiments, the subject may have cancer selected from melanoma; prostate cancer, prostatic neoplasms, adenocarcinoma of the prostate; lung cancer, e.g., small cell lung cancer, non-small cell lung cancer; ovarian cancer; gastric cancer; and glioblastoma. In some embodiments, the subject may have advanced melanoma or metastatic melanoma. In some embodiments, the subject may have stage III or IV melanoma, such as unresectable stage III or IV melanoma. In some embodiments, the subject may have prostate cancer. In some embodiments, the subject may have lung cancer, e.g., small cell lung cancer or non-small cell lung cancer.

[0067] In some embodiments of the methods described herein, determining the likelihood of clinical response may be based on the gene expression level and at least one additional factor. In some embodiments, the at least one additional factor may be selected from baseline serum LDH level and disease stage (e.g., M category). In some embodiments, the at least one additional factor may be baseline serum LDH level.

[0068] In some embodiments, at the time the likelihood of clinical response of the subject is determined, the subject may be not being treated, or may have not been treated, with the immunotherapeutic agent. In some embodiments, the subject may have been treated with the immunotherapeutic agent at the time the likelihood of clinical response of the subject is determined. For example, the expression level of the at least one gene may change over time in the subject. Thus, the likelihood of clinical response may be determined to decide whether to administer (or re-administer) the immunotherapeutic agent to the subject.

[0069] Also provided are kits comprising one or more reagents for determining expression level of at least one gene in a blood sample, wherein the at least one gene is selected from a first group of genes as listed in Table 2 and a second group of genes as listed in Table 3. In some embodiments, the one or more reagents may be used to determine mRNA expression level of the at least one gene. For example, the kit may comprise at least one nucleic acid or polynucleotide capable of specifically hybridizing to the at least one gene. For example, the kit may comprise at least one probe set capable of specifically hybridizing to the at least one gene. In some embodiments, the kit may comprise at least one probe set for microarray. In some embodiments, the kit may comprise at least one reagent for performing quantitative polymerase chain reaction (qPCR). In some embodiments, the kit may comprise at least one reagent for flow cytometry.

[0070] In some embodiments, the kit may comprise one or more reagents for determining expression level of at least one gene selected from IL2RB, KLRK1, G3BP, PPP1R16B, CLIC3, PRF1, SPON2, HOP, GNLY, TMEM161A, PRKCH, RUNX3, EOMES, SLC25A5, GZMB, IMP3, and ZAP70. In some embodiments, the kit may comprise one or more reagents for determining expression level of at least one gene selected from ASGR1, ASGR2, CENTA2, PGLS, MAPBPIP, STX10, C16ORF68, and RAB31.

[0071] In some embodiments, the kit may comprise one or more reagents for determining expression level of at least two genes in the blood sample. The at least two genes may be selected from the genes listed in Tables 2 and 3. In some embodiments, the first gene of the at least two genes may be selected from the first group of genes as listed in Table 2. In some embodiments, a second gene of the at least two genes may be selected from the second group of genes as listed in Table 3. For example, the first gene may be selected from IL2RB, KLRK1, G3BP, PPP1R16B, CLIC3, PRF1, SPON2, HOP, GNLY, TMEM161A, PRKCH, RUNX3, EOMES, SLC25A5, GZMB, IMP3, and ZAP70. For example, the first gene may be IL2RB. In some embodiments, the second gene may be selected from ASGR1, ASGR2, CENTA2, PGLS, MAPBPIP, STX10, C16ORF68, and RAB31. For example, the second gene may be selected from ASGR1 and ASGR2. In some embodiments, the first gene may be IL2RB and the second gene may be ASGR2. In some embodiments, the first gene may be IL2RB and the second gene may be ASGR1. In some embodiments, the at least two genes may be selected from the pairs of genes listed in Tables 7 and 10 (Example section).

[0072] In some embodiments, the kit may comprise one or more reagents for determining expression level of at least three genes in the blood sample. The first gene of the at least three genes may be selected from the first group of genes as listed in Table 2. The second gene of the at least three genes may be selected from the second group of genes as listed in Table 3. In some embodiments, the at least three genes may be selected from three-gene groups listed in Table 8 (Example section).

[0073] The following Example contains additional information, exemplification and guidance which can be adapted to the practice of this invention in its various embodiments and the equivalents thereof. The example is intended to help illustrate the invention, and is not intended to, nor should it be construed to, limit its scope.

### EXAMPLE

### Gene Signatures in Pre-Treatment Blood of Ipilimumab Treated Patients: Predictive and Prognostic Biomarkers of Response and Survival Introduction

[0074] Ipilimumab, a fully human monoclonal antibody against the cytotoxic T-lymphocyte-associated antigen 4 (CTLA-4), promotes antitumor immunity and improves overall survival (OS) in metastatic melanoma patients.^{1,2}

[0075] Several markers have been found to associate with OS or tumor response in patients receiving ipilimumab, including tumor expression of immune-related genes,³ changes in absolute lymphocyte count (ALC),⁴ EOMES-positive CD8⁺ T cells,⁵ ICOS^{hi} CD4⁺ T cells,⁶ NY-ESO-1 seropositivity,⁷ polyfunctional NY-ESO-1 specific T cell responses,⁸ and baseline myeloid-derived suppressor cell (MDSC) levels.⁹

[0076] Despite these insights, no marker has yet emerged that meets five key criteria: (1) can be measured prior to treatment in a readily-accessible sample (e.g. blood), (2) is significantly associated with OS in patients receiving ipilimumab, (3) has a clear mechanistic explanation rooted in the underlying biology, (4) has been repeated in a test cohort independent from the training cohort on which it was developed, and (5) has an effect of a magnitude sufficient to provide clinically meaningful predictions of OS.

[0077] In this study biomarkers that meet those five criteria were identified by analyzing gene expression levels in blood drawn from 88 patients prior to receiving ipilimumab and then testing candidate predictive models in a separate cohort of 69 patients.

### Materials and Methods

[0078] 1. Study Design

[0079] The multicenter, phase II clinical trial CA184-004 enrolled 82 previously-treated and untreated patients with unresectable stage III or IV melanoma, randomized 1:1 into 2 arms to receive up to 4 intravenous infusions of either 3 or 10 mg/kg ipilimumab every 3 weeks (Q3W) in the induction phase. In the phase II CA184-007 trial, treatment-naïve or previously treated patients with unresectable stage III/IV melanoma (N=115) received open-label ipilimumab (10 mg/kg every 3 wks for four doses) and were randomized to receive concomitant blinded prophylactic oral budesonide (9 mg/d with gradual taper through week 16) or placebo. Data for baseline (pre-treatment) serum lactate dehydrogenase (LDH) were available for 154 out of 157 patients in the two studies (67 in CA184004 and 87 in CA184007). Clinical variables including OS and disease stage (M category) were recorded. Patient disease stage (M category) information for each cohort appears in Table 1. Complete study design, patient characteristics and endpoint reports of these trials have been described elsewhere^{10,11}. Both studies were conducted in accordance with the ethical principles originating from the current Declaration of Helsinki and consistent with International Conference on Harmonization Good Clinical Practice and the ethical principles underlying European Union Directive 2001/20/EC and the United States Code of Federal Regulations, Title 21, Part 50 (21 C.F.R. 50). The protocols and patient informed consent forms received appropriate approval by all Institutional Review Boards or Independent Ethics Committees prior to study initiation. All participating patients (or their legally acceptable representatives) gave written informed consent for these biomarker focused studies.

TABLE 1
Disease stage (M Category) of patients in training and test cohorts

| | |
|---|---|
| Training Cohort (CA184-007) | Test Cohort (CA184-004) |

| M Category | N (%) | | M Category | N (%) | |
|---|---|---|---|---|---|
| M0 | 0 | (0%) | M0 | 1 | (1.4%) |
| M1A | 17 | (19%) | M1A | 17 | (24.6%) |
| M1B | 29 | (33%) | M1B | 5 | (7.3%) |
| M1C | 42 | (48%) | M1C | 46 | (66.7%) |
| Total | 88 | (100%) | Total | 69 | (100%) |

[0080] 2. Affymetrix Gene Expression Analysis

[0081] Whole blood was collected prior to treatment. Total RNA was extracted using the Prism 6100 (Applied Biosystems, Foster City, Calif.), purified by RNAClean Kit (Agencourt Bioscience Corporation; Beverly, Mass.), and evaluated on a 2100 Bioanalyzer (Agilent Technologies, Santa Clara, Calif.). Complementary DNA preparation and hybridization on HT-HG-U133A 96-array plates followed manufacturer's protocols (Affymetrix, Santa Clara, Calif.).

[0082] 3. Computational Analysis

[0083] The training cohort consisted of 88 patients from CA184007, and the test cohort comprised 69 patients from CA184004. All raw microarray data for the training and test cohorts were normalized together using a standard robust multichip average (RMA) approach,¹² which combines background adjustment, quantile normalization, and summarization, implemented in the Bioconductor package (v2.10, http://www.bioconductor.org)¹³ of the statistical computing language R (v2.15.1, http://www.r-project.org). For genes with multiple probes, the probe with the greatest mean expression level was selected.¹⁴

[0084] Feature Selection

[0085] A pathwise algorithm for Cox proportional-hazards (PH) regression, regularized by a lasso or elastic-net penalty, was applied to all probe sets for unique genes in the pre-treatment gene expression data from the training cohort to identify genes predictive of OS. This method has been previously described at length¹⁵ and is implemented as the glmnet package in the statistical computing language R. For much of the work the glmnet default alpha=1 (lasso penalty) was used, but it was also verified that alpha=0.95 yielded comparable results.

[0086] As a second method, a univariate Cox regression was applied to the pre-treatment gene expression data from the training cohort to rank the genes that were most significantly associated with OS.

[0087] Two-Gene Signature: Coefficient Estimation and Threshold Selection

[0088] Cox PH regression was used to estimate the coefficients for selected genes in order to best fit the OS data in the training cohort. Using the resulting coefficients and the gene expression values of the candidate genes, a two-gene score for each patient was calculated. For purposes of illustration, these scores were dichotomized by application of a classification threshold. This threshold was selected by minimizing, over all possible thresholds, the log-rank test p-value for comparing the OS curve in training-cohort patients with scores below the threshold to that in training-cohort patients with scores above the threshold.

[0089] Two-Gene Signature: Testing

[0090] For each patient in the test cohort, the coefficients previously estimated using the training cohort were used to calculate a score. Then the previously selected threshold was applied to classify patients into 2 groups, the Kaplan-Meier method¹⁶ was used to estimate the survival functions, and a log-rank test was used to compare OS in the 2 groups.

[0091] The scores for the training and test cohorts were then pooled, and the previously selected classification threshold was applied. Survival curves for the resulting 2 groups again were estimated by the Kaplan-Meier method and compared using a log-rank test.

[0092] Three-Factor Signature

[0093] Multivariable Cox PH regression was used to explore the relationship between selected genes and two of the most established prognostic factors in advanced melanoma: baseline serum lactate dehydrogenase (LDH) levels and disease stage (M category).¹⁷

[0094] An optimal three-factor signature (combining the previously-identified two-gene signature with LDH) was identified by performing a multivariable Cox regression on the training cohort to determine the best-fitting coefficients. Next, the comprehensive threshold exploration method described above was used to determine a good threshold.

[0095] Cell-Type Enrichment Analysis

[0096] A statistical method was developed to determine whether genes specific to particular cell types were over-represented in the set of genes positively associated with OS, and whether genes specific to particular cell types were over-represented in the set of genes negatively associated with OS. The publicly available Broad Institute Differentiation Map Portal (DMAP)¹⁸ data set was used. This data set contains a comprehensive collection of genome-wide gene expression profiles for all major human hematopoietic cell types in several replicates. To evaluate a given gene's cell-type specificity, for each gene profiled in the DMAP data an enrichment score was computed based on a published algorithm.¹⁹ Each enrichment score is a measure of how specific the expression of a particular gene is for a particular cell type. Next, for each cell type, cell-type specific gene sets were compiled using an enrichment score cut off of 10 as the criterion for inclusion of the gene into the gene set. Finally, separately for the set of genes positively associated with OS and the set of genes negatively associated with OS, a hypergeometric test was used to evaluate whether each gene set was enriched in genes specific for each of the cell types. The resulting hypergeometric p-values are reported in Tables 15-16, along with the hypergeometric p-values adjusted to control for false discovery rate (FDR) using the Benjamini-Hochberg method.

[0097] qPCR Data Analysis

[0098] Quantitative polymerase chain reaction (qPCR) was conducted using the TAQMAN® Gene Expression Assay (Life Technologies/Applied Biosystems) with Assay IDs Hs00172872_ml (EOMES) (target sequence RefSeq ID: NM_{—}005442.2) and Hs99999905_ml (GAPDH) (target sequence RefSeq ID: NM_{—}002046.4), respectively, according to methods previously described.³ The qPCR data were normalized using GAPDH as the housekeeping gene. An optimal threshold was identified using methods described above, and then a Kaplan-Meier plot was generated using R. The association with OS was determined by univariate Cox regression. In addition, Spearman's rank correlation was determined between the normalized EOMES expression by qPCR and the expression of selected genes by microarray.

### Results

### Identification of Potential Predictive-Prognostic Gene Signatures in Ipilimumab Treated Patients

[0099] Two analytical methods were used to identify genes predictive of OS: elastic-net regularized Cox PH regression, and univariate (unregularized) Cox PH regression.

[0100] When the elastic-net regularized regression method was applied to the gene expression profiles for the selected probe sets for 13,341 unique genes from 88 patients in the training cohort (treated in the CA184007 trial), with the regularization parameter, lambda between 0.3713 and 0.2443, it identified a combination of two genes predictive of OS: IL2RB (interleukin-2 receptor beta, also known as CD122; probe 205291_at) and ASGR1 (asialoglycoprotein receptor 1; probe 206743_s_at). Relaxing lambda to a number between 0.2443 and 0.2226 to identify the next gene yielded ASGR2 (asialoglycoprotein receptor 2; probe 206130_s_at). Further, the gene expression profiles of ASGR1 and ASGR2 were found to be highly correlated in the training cohort (Spearman's rank correlation, R=0.562, P=1.22×10⁻¹⁴) (Table 4). The two genes also have a close biological relationship, encoding two proteins that together form the asialoglycoprotein receptor.²⁰

TABLE 4
Genes with expression most highly correlated with that of IL2RB and ASGR2 in
both cohorts pooled, sorted by Spearman's rank correlation coefficient, R.

| IL2RB | | | | ASGR2 | | | |
|---|---|---|---|---|---|---|---|
| Gene | Probe Set | R | P Value | Gene | Probe Set | R | P Value |
| PRF1 | 214617_at | 0.735 | 2.77E−28 | CSPG2 | 221731_x_at | 0.605 | 2.91E−17 |
| RUNX3 | 204197_s_at | 0.729 | 1.24E−27 | FCN1 | 205237_at | 0.588 | 3.71E−16 |
| SPON2 | 218638_s_at | 0.692 | 5.13E−24 | CD14 | 201743_at | 0.588 | 3.75E−16 |
| CLIC3 | 219529_at | 0.692 | 5.44E−24 | GRN | 200678_x_at | 0.569 | 5.32E−15 |
| RFTN1 | 212646_at | 0.682 | 4.26E−23 | ASGR1 | 206743_s_at | 0.562 | 1.22E−14 |
| CD247 | 210031_at | 0.671 | 4.03E−22 | APLP2 | 208248_x_at | 0.551 | 5.26E−14 |
| TXK | 206828_at | 0.665 | 1.11E−21 | IFI30 | 201422_at | 0.538 | 2.52E−13 |
| PRKCH | 218764_at | 0.655 | 7.35E−21 | TSPO | 202096_s_at | 0.537 | 2.96E−13 |
| ZAP70 | 214032_at | 0.644 | 5.51E−20 | DUSP3 | 201536_at | 0.532 | 5.55E−13 |
| LUC7L2 | 220099_s_at | 0.641 | 9.34E−20 | HK3 | 205936_s_at | 0.526 | 1.08E−12 |
| FYN | 210105_s_at | 0.640 | 1.01E−19 | CENTA2 | 219358_s_at | 0.523 | 1.52E−12 |
| SYNE1 | 209447_at | 0.640 | 1.02E−19 | STAB1 | 204150_at | 0.520 | 2.26E−12 |
| TH1L | 220607_x_at | 0.637 | 1.67E−19 | LTA4H | 208771_s_at | 0.501 | 1.75E−11 |
| CHST12 | 218927_s_at | 0.636 | 2.05E−19 | CYFIP1 | 208923_at | 0.498 | 2.31E−11 |
| GZMB | 210164_at | 0.634 | 2.72E−19 | PLXNB2 | 208890_s_at | 0.491 | 5.17E−11 |
| DENND2D | 221081_s_at | 0.633 | 3.54E−19 | GNA15 | 205349_at | 0.489 | 5.94E−11 |
| CBLB | 209682_at | 0.632 | 3.98E−19 | CTSH | 202295_s_at | 0.488 | 6.61E−11 |
| IARS | 204744_s_at | 0.628 | 8.65E−19 | ANXA2P2 | 208816_x_at | 0.488 | 6.84E−11 |
| KLRD1 | 210606_x_at | 0.627 | 9.92E−19 | LILRB4 | 210152_at | 0.471 | 3.82E−10 |
| CCND2 | 200953_s_at | 0.623 | 1.67E−18 | CD33 | 206120_at | 0.457 | 1.34E−09 |
| PTGDR | 215894_at | 0.621 | 2.52E−18 | ANXA2 | 210427_x_at | 0.450 | 2.68E−09 |
| GPR56 | 212070_at | 0.620 | 2.90E−18 | LGALS1 | 201105_at | 0.399 | 1.90E−07 |
| NONO | 200057_s_at | 0.616 | 5.12E−18 | | | | |
| MAPRE2 | 202501_at | 0.615 | 6.48E−18 | | | | |
| HOP | 211597_s_at | 0.605 | 2.83E−17 | | | | |
| STAT4 | 206118_at | 0.605 | 2.88E−17 | | | | |
| NCAM1 | 212843_at | 0.604 | 3.56E−17 | | | | |
| RNPS1 | 200060_s_at | 0.603 | 4.00E−17 | | | | |
| NKG7 | 213915_at | 0.603 | 4.24E−17 | | | | |
| EVL | 217838_s_at | 0.601 | 5.14E−17 | | | | |
| KLRF1 | 220646_s_at | 0.600 | 6.35E−17 | | | | |
| PRKCQ | 210038_at | 0.598 | 8.34E−17 | | | | |
| TGFBR3 | 204731_at | 0.597 | 9.62E−17 | | | | |
| PYHIN1 | 216748_at | 0.597 | 9.66E−17 | | | | |
| CCL4 | 204103_at | 0.594 | 1.46E−16 | | | | |
| RBBP7 | 201092_at | 0.593 | 1.79E−16 | | | | |
| KLRK1 | 205821_at | 0.592 | 1.99E−16 | | | | |
| PVRIG | 219812_at | 0.591 | 2.32E−16 | | | | |
| SLC25A3 | 200030_s_at | 0.591 | 2.55E−16 | | | | |
| ST6GAL1 | 201998_at | 0.590 | 2.70E−16 | | | | |
| TBX21 | 220684_at | 0.589 | 3.29E−16 | | | | |
| GTF3C2 | 212429_s_at | 0.586 | 4.87E−16 | | | | |
| SIDT1 | 219734_at | 0.586 | 5.14E−16 | | | | |
| ARHGEF7 | 202548_s_at | 0.584 | 6.53E−16 | | | | |
| MAGED1 | 209014_at | 0.584 | 6.54E−16 | | | | |
| CD160 | 207840_at | 0.582 | 8.66E−16 | | | | |
| ADA | 204639_at | 0.581 | 9.91E−16 | | | | |
| LPXN | 216250_s_at | 0.579 | 1.31E−15 | | | | |
| CX3CR1 | 205898_at | 0.579 | 1.34E−15 | | | | |
| DNMT1 | 201697_s_at | 0.576 | 1.85E−15 | | | | |
| NFATC3 | 210555_s_at | 0.576 | 2.06E−15 | | | | |
| ATP2B4 | 212135_s_at | 0.575 | 2.29E−15 | | | | |
| PPP1R16B | 212750_at | 0.574 | 2.62E−15 | | | | |
| TRA@//TRD@ | 217143_s_at | 0.574 | 2.63E−15 | | | | |
| SMAD3 | 218284_at | 0.573 | 2.91E−15 | | | | |
| HSP90AB1 | 200064_at | 0.572 | 3.55E−15 | | | | |
| DDX47 | 220890_s_at | 0.571 | 3.73E−15 | | | | |
| CDC25B | 201853_s_at | 0.570 | 4.25E−15 | | | | |
| PLEKHA1 | 219024_at | 0.569 | 4.81E−15 | | | | |
| CS | 208660_at | 0.568 | 6.10E−15 | | | | |
| YPEL1 | 213996_at | 0.566 | 7.16E−15 | | | | |
| IL10RA | 204912_at | 0.566 | 7.54E−15 | | | | |
| ITPR3 | 201189_s_at | 0.566 | 7.73E−15 | | | | |
| TMEM109 | 201361_at | 0.566 | 7.86E−15 | | | | |
| IMP3 | 221688_s_at | 0.566 | 8.03E−15 | | | | |
| NCALD | 211685_s_at | 0.565 | 8.51E−15 | | | | |
| WWP1 | 212638_s_at | 0.564 | 1.02E−14 | | | | |
| SPTBN1 | 212071_s_at | 0.562 | 1.30E−14 | | | | |
| NPIP | 204538_x_at | 0.562 | 1.31E−14 | | | | |
| KIFAP3 | 203333_at | 0.562 | 1.32E−14 | | | | |
| PLEKHF1 | 219566_at | 0.561 | 1.38E−14 | | | | |
| OFD1 | 203569_s_at | 0.561 | 1.43E−14 | | | | |
| CTSW | 214450_at | 0.561 | 1.47E−14 | | | | |
| BLMH | 202179_at | 0.560 | 1.75E−14 | | | | |
| AUTS2 | 212599_at | 0.558 | 2.12E−14 | | | | |
| GNLY | 37145_at | 0.557 | 2.54E−14 | | | | |
| LCK | 204891_s_at | 0.556 | 2.65E−14 | | | | |
| KIR3DL2 | 207314_x_at | 0.555 | 3.32E−14 | | | | |
| LOC339047 | 221501_x_at | 0.554 | 3.39E−14 | | | | |
| ZMYND11 | 202136_at | 0.552 | 4.61E−14 | | | | |
| SLC35E2 | 217122_s_at | 0.549 | 6.37E−14 | | | | |
| CRTC3 | 218648_at | 0.548 | 7.38E−14 | | | | |

[0101] Applying the univariate (unregularized) Cox PH regression approach to the pre-treatment blood gene expression data from the 88 patients in the training cohort yielded 73 genes associated with OS with p<0.005 (Table 5), including a subset of 16 genes with p<0.001 (Table 6). IL2RB had the smallest p-value (p=4.62×10⁻⁷) in the training cohort, and higher expression of this gene was positively associated with longer survival (hazard ratio=0.28, 95% CI=0.17 to 0.46). Among the genes for which higher expression was associated with shorter survival (hazard ratio>1), ASGR1 and ASGR2 had the smallest p-values in the training cohort (P=1.18×10⁻⁶ and 1.42×10⁴, respectively).

TABLE 5
Top overall survival-associated genes in training cohort
by univariate Cox PH regression analysis, p < 0.005.

| | | Hazard Ratio | |
|---|---|---|---|
| Gene | Probe Set | (95% CI) | P Value |
| IL2RB | 205291_at | 0.28 (0.17-0.46) | 4.62E−07 |
| ASGR1 | 206743_s_at | 4.00 (2.30-6.94) | 1.18E−06 |
| KLRK1 | 205821_at | 0.40 (0.26-0.62) | 3.51E−05 |
| G3BP | 201503_at | 0.17 (0.07-0.41) | 6.44E−05 |
| PPP1R16B | 212750_at | 0.20 (0.08-0.46) | 1.24E−04 |
| ASGR2 | 206130_s_at | 2.05 (1.41-2.99) | 1.42E−04 |
| CLIC3 | 219529_at | 0.45 (0.29-0.70) | 1.58E−04 |
| PRF1 | 214617_at | 0.49 (0.34-0.70) | 2.60E−04 |
| SPON2 | 218638_s_at | 0.53 (0.38-0.73) | 3.77E−04 |
| HOP | 211597_s_at | 0.50 (0.33-0.76) | 4.76E−04 |
| GNLY | 37145_at | 0.50 (0.34-0.73) | 4.92E−04 |
| TMEM161A | 43977_at | 0.12 (0.04-0.43) | 6.26E−04 |
| CENTA2 | 219358_s_at | 3.99 (1.76-9.05) | 6.43E−04 |
| PRKCH | 218764_at | 0.50 (0.34-0.73) | 6.75E−04 |
| PGLS | 218388_at | 5.03 (1.89-13.37) | 9.13E−04 |
| RUNX3 | 204197_s_at | 0.40 (0.24-0.69) | 9.65E−04 |
| CEBPA | 204039_at | 3.61 (1.65-7.88) | 1.06E−03 |
| GZMB | 210164_at | 0.50 (0.32-0.76) | 1.07E−03 |
| CCND2 | 200953_s_at | 0.42 (0.25-0.70) | 1.11E−03 |
| ZBP1 | 208087_s_at | 3.36 (1.67-6.76) | 1.16E−03 |
| NKG7 | 213915_at | 0.48 (0.31-0.75) | 1.17E−03 |
| ARL2BP | 202092_s_at | 0.30 (0.15-0.62) | 1.19E−03 |
| CCL4 | 204103_at | 0.53 (0.37-0.78) | 1.31E−03 |
| PMS2L11 | 210707_x_at | 0.34 (0.18-0.65) | 1.42E−03 |
| ZMYND11 | 202136_at | 0.49 (0.32-0.76) | 1.72E−03 |
| TTC17 | 218972_at | 0.35 (0.19-0.67) | 1.80E−03 |
| MAPBPIP | 218291_at | 4.34 (1.73-10.91) | 1.87E−03 |
| CLDN15 | 219640_at | 0.22 (0.08-0.58) | 2.00E−03 |
| TBX21 | 220684_at | 0.49 (0.31-0.77) | 2.09E−03 |
| CEACAM3 | 208052_x_at | 3.71 (1.57-8.75) | 2.11E−03 |
| ING2 | 205981_s_at | 3.79 (1.67-8.60) | 2.23E−03 |
| LUC7L2 | 220099_s_at | 0.40 (0.23-0.71) | 2.28E−03 |
| CAT | 201432_at | 0.40 (0.22-0.73) | 2.30E−03 |
| IMP3 | 221688_s_at | 0.37 (0.20-0.70) | 2.31E−03 |
| CD2 | 205831_at | 0.50 (0.33-0.76) | 2.37E−03 |
| GZMA | 205488_at | 0.55 (0.38-0.81) | 2.39E−03 |
| SPCS2 | 201240_s_at | 0.37 (0.21-0.68) | 2.47E−03 |
| HOMER3 | 215489_x_at | 4.22 (1.66-10.69) | 2.57E−03 |
| RPA2 | 201756_at | 0.48 (0.31-0.76) | 2.61E−03 |
| RAB31 | 217763_s_at | 3.31 (1.48-7.41) | 2.63E−03 |
| SLC25A5 | 200657_at | 0.18 (0.07-0.52) | 2.69E−03 |
| ARF5 | 201526_at | 4.80 (1.72-13.42) | 2.70E−03 |
| CHST12 | 218927_s_at | 0.30 (0.13-0.68) | 2.75E−03 |
| MNAB | 220202_s_at | 0.31 (0.14-0.67) | 3.01E−03 |
| IL1RN | 212657_s_at | 2.36 (1.33-4.21) | 3.02E−03 |
| GPR56 | 212070_at | 0.52 (0.34-0.80) | 3.11E−03 |
| TXNIP | 201010_s_at | 0.16 (0.05-0.54) | 3.19E−03 |
| CCND3 | 201700_at | 0.34 (0.17-0.72) | 3.38E−03 |
| TRATRD | 217147_s_at | 0.56 (0.38-0.81) | 3.45E−03 |
| LILRA5 | 215838_at | 1.87 (1.23-2.84) | 3.47E−03 |
| ZAP70 | 214032_at | 0.48 (0.29-0.79) | 3.48E−03 |
| PYCARD | 221666_s_at | 3.67 (1.54-8.74) | 3.49E−03 |
| ADA | 204639_at | 0.37 (0.18-0.75) | 3.69E−03 |
| HPSE | 219403_s_at | 1.89 (1.23-2.92) | 3.71E−03 |
| TSPO | 202096_s_at | 3.96 (1.54-10.21) | 3.71E−03 |
| LOC130074 | 212017_at | 0.33 (0.15-0.69) | 3.82E−03 |
| GFOD1 | 219821_s_at | 0.41 (0.22-0.76) | 4.13E−03 |
| HLA-A /// | 213932_x_at | 0.18 (0.06-0.58) | 4.15E−03 |
| HLA-H /// | | | |
| LOC642047 /// | | | |
| LOC649853 /// | | | |
| LOC649864 | | | |
| CECR7 | 220452_x_at | 0.16 (0.04-0.59) | 4.23E−03 |
| SERTAD3 | 219382_at | 3.96 (1.51-10.38) | 4.25E−03 |
| C7ORF24 | 215380_s_at | 0.24 (0.09-0.65) | 4.31E−03 |
| ZNF364 | 212742_at | 0.20 (0.06-0.62) | 4.34E−03 |
| SULT1A1 | 215299_x_at | 2.16 (1.26-3.71) | 4.38E−03 |
| S100A6 | 217728_at | 3.69 (1.49-9.17) | 4.41E−03 |
| ID2 | 201565_s_at | 0.33 (0.16-0.70) | 4.42E−03 |
| STX10 | 212625_at | 3.51 (1.44-8.55) | 4.47E−03 |
| KLRD1 | 210606_x_at | 0.55 (0.36-0.85) | 4.57E−03 |
| SH2D2A | 207351_s_at | 0.33 (0.15-0.73) | 4.58E−03 |
| MATK | 206267_s_at | 0.41 (0.23-0.75) | 4.60E−03 |
| IFI6 | 204415_at | 1.49 (1.15-1.94) | 4.88E−03 |
| CDC25B | 201853_s_at | 0.54 (0.35-0.82) | 4.92E−03 |
| C16ORF68 | 218945_at | 2.40 (1.33-4.35) | 4.94E−03 |
| GIMAP4 | 219243_at | 0.25 (0.09-0.66) | 4.97E−03 |

TABLE 6
Top overall survival-associated genes in training cohort
by univariate Cox PH regression analysis, with p < 0.001

| | | Hazard Ratio | |
|---|---|---|---|
| Gene | Probe Set | (95% CI) | P Value |
| IL2RB | 205291_at | 0.28 (0.17-0.46) | 4.62E−07 |
| ASGR1 | 206743_s_at | 4.00 (2.30-6.94) | 1.18E−06 |
| KLRK1 | 205821_at | 0.40 (0.26-0.62) | 3.51E−05 |
| G3BP | 201503_at | 0.17 (0.07-0.41) | 6.44E−05 |
| PPP1R16B | 212750_at | 0.20 (0.08-0.46) | 1.24E−04 |
| ASGR2 | 206130_s_at | 2.05 (1.41-2.99) | 1.42E−04 |
| CLIC3 | 219529_at | 0.45 (0.29-0.70) | 1.58E−04 |
| PRF1 | 214617_at | 0.49 (0.34-0.70) | 2.60E−04 |
| SPON2 | 218638_s_at | 0.53 (0.38-0.73) | 3.77E−04 |
| HOP | 211597_s_at | 0.50 (0.33-0.76) | 4.76E−04 |
| GNLY | 37145_at | 0.50 (0.34-0.73) | 4.92E−04 |
| TMEM161A | 43977_at | 0.12 (0.04-0.43) | 6.26E−04 |
| CENTA2 | 219358_s_at | 3.99 (1.76-9.05) | 6.43E−04 |
| PRKCH | 218764_at | 0.50 (0.34-0.73) | 6.75E−04 |
| PGLS | 218388_at | 5.03 (1.89-13.37) | 9.13E−04 |
| RUNX3 | 204197_s_at | 0.40 (0.24-0.69) | 9.65E−04 |

[0102] Next, the 73 genes identified above were analyzed in all 2,628 possible two-gene and all 62,196 possible three-gene combinations. For each such combination, an unregularized Cox PH model to predict OS as an additive function of the two or three expression values was fit to the training-cohort data. A likelihood-ratio test was used to compare each model to a null (constant) model. Among the top 10 two-gene signatures in the training cohort (Table 7) by p-value (where p-value is used solely for ranking), two stood out as being the highest ranked: IL2RB+ASGR1 (p=1.56×10⁻¹⁰) and IL2RB+ASGR2 (p=2.79×10⁻¹⁰).

TABLE 7
Top two-gene signatures in training
cohort by Cox PH regression analysis.

| | | Training Cohort | Test Cohort | Both Cohorts |
|---|---|---|---|---|
| Gene 1 | Gene 2 | P Value | P Value | P Value |
| IL2RB | ASGR1 | 1.56E−10 | 2.21E−03 | 2.21E−13 |
| IL2RB | ASGR2 | 2.79E−10 | 5.00E−04 | 1.32E−13 |
| IL2RB | PGLS | 1.25E−09 | 4.05E−02 | 3.00E−09 |
| IL2RB | CENTA2 | 2.31E−09 | 1.38E−02 | 1.47E−10 |
| ASGR1 | PRF1 | 3.23E−09 | 1.66E−02 | 3.15E−11 |
| ASGR1 | SLC25A5 | 3.80E−09 | 3.45E−03 | 6.23E−12 |
| ASGR1 | SPON2 | 6.36E−09 | 1.17E−02 | 3.95E−11 |
| ASGR1 | GNLY | 9.32E−09 | 5.06E−02 | 3.78E−10 |
| IL2RB | MAPBPIP | 1.06E−08 | 6.61E−03 | 3.07E−10 |
| ASGR1 | GZMB | 1.11E−08 | 4.91E−02 | 2.02E−09 |

[0103] The three-gene signature with the smallest p-value in the training cohort was comprised of the combination of IL2RB, ASGR2, and CAT (catalase, probe 201432_at), p=2.41×10⁴¹. However, the p-value of this signature in the test cohort (as determined by applying the training model coefficients and threshold to the test cohort and calculating the log-rank p-value) was p=6.40×10⁻³, not below the p<0.001 threshold. To further explore the potential value of adding a third gene, possible three-gene signatures with a p<0.001 in the test cohort were examined. Among these, the three-gene signature with the smallest p-value in the training cohort (p=1.94×10⁻¹⁰) was IL2RB+ASGR2+ZBP1 (Z-DNA binding protein 1, probe 208087_s_at), with a significant p value also in the test cohort (p=9.53×10⁻⁴). For the training cohort, adding a third gene decreased the p-value for association with OS by at most one order of magnitude over the best two-gene signature (IL2RB+ASGR2). Furthermore, time-dependent Receiver Operating Characteristic (ROC) curves at 12 months²¹ show that the majority of the predictive power comes from IL2RB+ASGR2 (FIG. 4). In addition, among the top ten three-gene signatures in the training cohort (Table 8), six contained IL2RB and six contained either ASGR1 or ASGR2.

TABLE 8
Top three-gene signatures in training
cohort by Cox PH regression analysis.

| | | | Training | Test | Both |
|---|---|---|---|---|---|
| | | | Cohort | Cohort | Cohorts |
| Gene 1 | Gene 2 | Gene 3 | P Value | P Value | P Value |
| IL2RB | ASGR2 | CAT | 2.41E−11 | 6.40E−03 | 3.56E−13 |
| IL2RB | ASGR2 | PGLS | 3.13E−11 | 1.22E−02 | 2.28E−12 |
| SPON2 | PGLS | SLC25A5 | 3.26E−11 | 1.64E−01 | 4.50E−08 |
| IL2RB | ASGR1 | CAT | 4.02E−11 | 1.57E−02 | 8.19E−13 |
| IL2RB | ASGR2 | ASGR1 | 6.38E−11 | 2.99E−03 | 5.45E−14 |
| SPON2 | MAPBPIP | SLC25A5 | 6.71E−11 | 1.48E−02 | 2.90E−11 |
| IL2RB | PGLS | SLC25A5 | 6.97E−11 | 8.00E−02 | 2.60E−09 |
| IL2RB | ASGR1 | SLC25A5 | 8.16E−11 | 3.57E−03 | 1.07E−13 |
| PRF1 | PGLS | SLC25A5 | 8.42E−11 | 1.92E−01 | 1.07E−07 |
| PRF1 | ASGR1 | SLC25A5 | 1.01E−10 | 5.45E−03 | 2.36E−13 |

[0104] In summary, two different methods converged on two signatures associated with OS in metastatic melanoma patients receiving ipilimumab: IL2RB+ASGR1 and IL2RB+ASGR2. Both signatures yielded comparable log-rank p-values and Kaplan-Meier plots in the training, test, and pooled cohorts (IL2RB+ASGR2, FIG. 1; IL2RB+ASGR1, FIG. 6). However, ASGR2 had a significantly higher mean expression level than ASGR1 (1.54-fold higher, P=1.32×10⁻⁶⁹ by paired t-test, FIG. 5), and therefore is likely to confer more consistency, less inter-assay variability and higher clinical robustness to a predictive signature. For this reason, the combination of IL2RB+ASGR2 was chosen as the primary two-gene signature for the analyses that follow.

[0105] The two coefficients for combining IL2RB and ASGR2 in a two-gene signature to predict OS were estimated using unregularized Cox PH regression in the training cohort. The estimated coefficients were −1.312 for IL2RB and 0.748 for ASGR2 (Table 9). The two-gene score for each patient could thus be calculated from the following equation: −1.312*X_{IL2RB}+0.748*X_{ASGR2}, where Xⱼ gives the log 2-scale RMA-normalized expression level for gene j. The signs of the coefficients indicate that higher expression of IL2RB was associated with longer survival (lesser hazard) whereas higher expression of ASGR2 was associated with shorter survival (greater hazard).

TABLE 9
Coefficients based on the training and test cohorts and the two cohorts pooled
together, as well as coefficients based on regularized Cox regression.

| | | Training Cohort | | Test Cohort | | Both Cohorts Pooled | |
|---|---|---|---|---|---|---|---|
| | | Lambda | | Lambda | | Lambda | |
| Gene | Model | (by CV) | Coefficient | (by CV) | Coefficient | (by CV) | Coefficient |
| IL2RB | alpha = 1 | 0.02895 | −1.20684 | 0.115523 | −0.36107 | 0.0417252 | −0.804715 |
| | alpha = 0.95 | 0.023 | −1.2291964 | 0.0696 | −0.458378 | 0.0482 | −0.791582 |
| | Unregularized | 0 | −1.3123 | 0 | −0.5861 | 0 | −0.9063 |
| ASGR2 | alpha = 1 | 0.02895 | 0.66974 | 0.115523 | 0.28155 | 0.0417252 | 0.5239357 |
| | alpha = 0.95 | 0.023 | 0.686752 | 0.0696 | 0.350097 | 0.0482 | 0.5149287 |
| | Unregularized | 0 | 0.7475 | 0 | 0.4419 | 0 | 0.59948 |

[0106] In order to generate Kaplan-Meier plots evaluating the association of the two-gene score with OS, it was necessary to select a threshold separating scores for high risk patients (shorter survival) from those with low risk (longer survival). Thus, each possible threshold was applied to classify the training cohort into two risk groups, and a log-rank test was used to compare OS in the two groups (FIG. 7A). The threshold yielding the largest chi-square statistic was −5.80, with longer survivors having smaller score values and shorter survivors having greater values (FIG. 1A).

[0107] In order to test our findings from the training cohort, the same coefficients and threshold were applied to the gene expression data from patients in the test cohort (CA184004 trial). The two-gene signature maintained a highly significant association with OS in the test cohort (log-rank p=1.74×10⁻⁴) with a clear separation of the survival curve estimates (FIG. 1B).

[0108] Finally, for illustration purposes, training- and test-cohort scores were pooled for the same two-gene signature, using the coefficients and threshold estimated from the training-cohort data alone, and again estimated OS curves for the two resulting risk groups (FIG. 1C).

[0109] While the two-gene signatures comprised of IL2RB+ASGR2 and IL2RB+ASGR1 were optimal with regard to our model-selection criteria in the training cohort, and were significant and had good predictive accuracy in the test cohort, for completeness this study sought to identify additional pairs of genes that were strongly associated with OS in both the training and test cohorts. For the 2,628 possible two-gene signatures derived from the 73 best genes in the training cohort, Cox PH regression was used to estimate the coefficients and p-values in the training cohort, then the coefficients from the training cohort was applied to the test cohort and the resulting p-values determined. All signatures that had p<0.001 in both the training cohort and the test cohort were retained (Table 10). Then the same procedure was used in reverse: all genes with a univariate Cox regression p<0.005 in the test cohort were selected, then all two-gene combinations formed from those genes were evaluated and the ones with p<0.001 in both the test and training cohorts were retained. More than 88% of the resulting signatures included IL2RB or ASGR2 (Table 11).

TABLE 10
Two-gene signatures with p < 0.001 by Cox PH regression
in both cohorts, sorted by training-cohort P value.

| | | Training Cohort | Test Cohort | Both Cohorts |
|---|---|---|---|---|
| Gene 1 | Gene 2 | P Value | P Value | P Value |
| IL2RB | ASGR2 | 2.79E−10 | 5.00E−04 | 1.32E−13 |
| IL2RB | STX10 | 1.87E−07 | 7.97E−04 | 6.82E−10 |
| IL2RB | C16ORF68 | 4.55E−07 | 4.10E−04 | 4.59E−10 |
| ASGR2 | RUNX3 | 5.55E−07 | 3.99E−04 | 8.43E−10 |
| ASGR2 | IMP3 | 2.19E−06 | 8.47E−04 | 4.58E−09 |
| ASGR2 | SLC25A5 | 2.61E−06 | 4.72E−04 | 4.93E−10 |
| ASGR2 | C16ORF68 | 3.44E−05 | 3.05E−04 | 4.60E−09 |
| ZAP70 | STX10 | 2.30E−04 | 5.71E−04 | 5.39E−07 |
| RAB31 | C16ORF68 | 2.39E−04 | 5.14E−05 | 4.74E−07 |
| STX10 | C16ORF68 | 3.50E−04 | 2.11E−04 | 1.30E−06 |
| RUNX3 | STX10 | 3.88E−04 | 3.72E−04 | 1.58E−05 |
| SLC25A5 | STX10 | 5.25E−04 | 3.26E−04 | 2.74E−06 |
| PRKCH | C16ORF68 | 6.27E−04 | 3.80E−04 | 8.95E−06 |
| RUNX3 | C16ORF68 | 6.38E−04 | 9.48E−05 | 9.07E−06 |

TABLE 11
Additional two-gene signatures with p < 0.001 by Cox
PH regression in both cohorts, determined by training on
original test cohort and testing on original training cohort,
and sorted by P Value in original training cohort.

| | | Original | Original | |
|---|---|---|---|---|
| | | Test | Training | Both |
| | | Cohort | Cohort | Cohorts |
| Gene 1 | Gene 2 | P Value | P Value | P Value |
| IL2RB | ASGR2 | 4.81E−04 | 5.05E−10 | 1.66E−13 |
| ASGR2 | RUNX3 | 3.95E−04 | 5.29E−07 | 9.20E−10 |
| IL2RB | MT1M | 3.04E−05 | 3.95E−06 | 2.37E−11 |
| IL2RB | C16ORF68 | 3.51E−05 | 4.66E−06 | 1.19E−09 |
| ASGR2 | WBP11 | 2.03E−04 | 5.98E−06 | 5.01E−09 |
| ASGR2 | EIF4B | 8.09E−04 | 6.39E−06 | 2.25E−09 |
| IL2RB | HIST2H2AA /// | 3.52E−04 | 6.82E−06 | 2.16E−09 |
| | LOC653610 /// | | | |
| | H2AR | | | |
| ASGR2 | RFTN1 | 9.59E−05 | 1.08E−05 | 4.71E−08 |
| IL2RB | IFI27 | 2.41E−06 | 1.09E−05 | 1.24E−10 |
| IL2RB | AMFR | 4.60E−04 | 1.13E−05 | 9.65E−10 |
| IL2RB | FOLR3 | 1.80E−05 | 1.42E−05 | 5.33E−10 |
| ASGR2 | AMFR | 1.51E−04 | 1.83E−05 | 3.04E−10 |
| IL2RB | C4A /// C4B | 1.94E−04 | 1.88E−05 | 3.51E−08 |
| IL2RB | VPREB3 | 3.07E−04 | 1.89E−05 | 3.98E−08 |
| ASGR2 | C4A /// C4B | 1.67E−05 | 2.16E−05 | 6.90E−10 |
| RBBP7 | ASGR2 | 3.96E−04 | 2.36E−05 | 1.54E−08 |
| IL2RB | FTHP1 | 6.47E−04 | 2.74E−05 | 1.24E−06 |
| IL2RB | HK3 | 5.36E−04 | 2.99E−05 | 7.44E−08 |
| ASGR2 | ZAP70 | 9.49E−04 | 3.16E−05 | 1.02E−08 |
| IL2RB | KIAA1026 | 2.66E−04 | 3.26E−05 | 3.08E−08 |
| IL2RB | ACTA2 | 3.13E−05 | 3.82E−05 | 7.67E−10 |
| IL2RB | FTH1 | 8.81E−05 | 4.41E−05 | 8.58E−06 |
| IL2RB | SLC7A1 | 1.85E−07 | 5.45E−05 | 1.43E−10 |
| ASGR2 | C16ORF68 | 1.78E−04 | 5.46E−05 | 9.66E−09 |
| ASGR2 | HSPA8 | 4.44E−04 | 7.11E−05 | 1.68E−08 |
| IL2RB | SUMO2 | 6.35E−04 | 7.21E−05 | 2.41E−07 |
| ASGR2 | HNRPH1 | 5.96E−04 | 7.25E−05 | 2.15E−08 |
| IL2RB | HP /// HPR | 8.00E−05 | 7.64E−05 | 8.25E−09 |
| IL2RB | GTF3A | 4.37E−04 | 7.71E−05 | 8.72E−07 |
| IL2RB | LOC171220 | 3.96E−05 | 8.25E−05 | 3.81E−05 |
| FOXO3A | IL2RB | 5.36E−04 | 8.34E−05 | 2.48E−06 |
| IL2RB | TCF3 | 6.30E−06 | 8.75E−05 | 7.56E−08 |
| ASGR2 | CD247 | 7.57E−04 | 9.46E−05 | 6.59E−08 |
| ASGR2 | MAGED1 | 5.19E−04 | 1.01E−04 | 6.89E−07 |
| ASGR2 | CAMP | 2.97E−06 | 1.06E−04 | 1.40E−09 |
| ASGR2 | XBP1 | 5.16E−04 | 1.12E−04 | 2.61E−08 |
| ASGR2 | IFI27 | 1.70E−05 | 1.14E−04 | 9.88E−10 |
| IL2RB | CA4 | 3.67E−04 | 1.30E−04 | 2.12E−07 |
| ASGR2 | LOC171220 | 2.29E−04 | 1.44E−04 | 4.79E−05 |
| IL2RB | NCF1 /// | 2.28E−04 | 1.57E−04 | 1.51E−08 |
| | LOC653361 /// | | | |
| | LOC653840 | | | |
| ASGR2 | MTMR1 | 2.37E−05 | 1.63E−04 | 1.57E−08 |
| IL2RB | HSPA6 /// | 4.48E−04 | 1.66E−04 | 5.98E−07 |
| | LOC652878 | | | |
| C4A /// C4B | RAB31 | 6.00E−05 | 1.66E−04 | 5.94E−07 |
| IL2RB | ACTN1 | 7.68E−04 | 1.66E−04 | 1.98E−07 |
| ASGR2 | IL10RA | 2.36E−04 | 1.69E−04 | 3.04E−07 |
| ASGR2 | SUMO2 | 2.71E−04 | 1.82E−04 | 5.19E−08 |
| ASGR2 | HP /// HPR | 4.21E−04 | 1.91E−04 | 1.65E−08 |
| IL2RB | PQLC1 | 1.79E−04 | 1.92E−04 | 1.52E−07 |
| ASGR2 | TCF3 | 1.19E−05 | 1.95E−04 | 3.51E−08 |
| IL2RB | HNRPH1 | 4.93E−04 | 1.95E−04 | 2.83E−07 |
| IL2RB | MAG | 2.75E−05 | 1.98E−04 | 1.39E−08 |
| IL2RB | WNK1 | 9.21E−05 | 2.01E−04 | 5.41E−07 |
| IL2RB | HIST1H2BD | 2.83E−04 | 2.14E−04 | 4.80E−08 |
| ASGR2 | EVL | 4.26E−04 | 2.30E−04 | 1.15E−07 |
| RAB31 | C16ORF68 | 3.82E−05 | 2.37E−04 | 3.45E−07 |
| ASGR2 | FTH1 | 4.46E−04 | 2.46E−04 | 1.33E−05 |
| ASGR2 | FAM102A | 3.02E−04 | 2.50E−04 | 1.41E−07 |
| ASGR2 | NPM1 | 5.13E−04 | 2.57E−04 | 1.80E−07 |
| IL2RB | HSPA6 | 2.72E−04 | 2.59E−04 | 3.81E−07 |
| ASGR2 | FOLR3 | 3.22E−06 | 2.68E−04 | 7.96E−10 |
| IL2RB | FAM102A | 1.95E−04 | 2.86E−04 | 4.65E−07 |
| IL2RB | HLADQB1 /// | 1.25E−05 | 3.10E−04 | 1.28E−08 |
| | LOC650557 | | | |
| IL2RB | RALBP1 | 2.13E−04 | 3.22E−04 | 7.06E−08 |
| IL2RB | ECGF1 | 4.85E−04 | 3.26E−04 | 1.54E−06 |
| ASGR2 | MAP3K4 | 5.38E−04 | 3.46E−04 | 2.54E−06 |
| IL2RB | PPP1R10 | 4.73E−06 | 3.61E−04 | 1.03E−09 |
| ASGR2 | PDCD4 | 4.33E−04 | 3.64E−04 | 1.24E−06 |
| RUNX3 | KIAA0690 | 7.23E−04 | 3.75E−04 | 1.10E−06 |
| IL2RB | MTMR1 | 3.55E−04 | 3.94E−04 | 1.13E−06 |
| IL2RB | CKAP4 | 3.83E−05 | 4.14E−04 | 8.02E−08 |
| RFTN1 | RAB31 | 5.89E−04 | 4.17E−04 | 6.86E−05 |
| ASGR2 | KIAA1026 | 1.24E−04 | 4.18E−04 | 4.68E−08 |
| IL2RB | P2RX5 | 9.59E−05 | 4.21E−04 | 3.48E−07 |
| IL2RB | ZAP70 | 7.15E−04 | 4.27E−04 | 7.38E−07 |
| IFI27 | RAB31 | 7.89E−06 | 4.32E−04 | 6.29E−08 |
| ASGR2 | KIAA0746 | 5.33E−04 | 4.36E−04 | 1.83E−07 |
| IL2RB | UBE2M | 9.69E−06 | 4.55E−04 | 6.23E−06 |
| IL2RB | PGCP | 2.49E−04 | 4.70E−04 | 4.14E−07 |
| IL2RB | NAGK | 2.73E−04 | 4.91E−04 | 6.93E−07 |
| IL2RB | MARK3 | 1.56E−04 | 4.92E−04 | 1.17E−05 |
| IL2RB | ENDOD1 | 9.02E−06 | 4.97E−04 | 1.08E−07 |
| IL2RB | CD6 | 1.51E−04 | 5.14E−04 | 5.39E−07 |
| IL2RB | MRPL46 | 2.26E−04 | 5.34E−04 | 1.51E−04 |
| C4A /// C4B | KIAA0690 | 3.40E−05 | 5.50E−04 | 7.24E−08 |
| IL2RB | HDAC5 | 1.25E−05 | 5.66E−04 | 1.27E−07 |
| ASGR2 | NOL7 | 8.39E−04 | 5.81E−04 | 4.07E−06 |
| ASGR2 | LCN2 | 1.12E−09 | 5.84E−04 | 6.77E−11 |
| RUNX3 | MT1M | 1.24E−04 | 6.51E−04 | 7.87E−08 |
| IL2RB | HPCAL1 | 1.70E−04 | 6.53E−04 | 1.87E−06 |
| MTF1 | C4A /// C4B | 9.36E−05 | 6.55E−04 | 3.71E−08 |
| IL2RB | SMO | 3.17E−04 | 6.73E−04 | 9.23E−07 |
| ASGR2 | MARK3 | 9.66E−05 | 6.87E−04 | 1.19E−06 |
| ASGR2 | RALBP1 | 4.75E−05 | 6.88E−04 | 4.14E−08 |
| IL2RB | TALDO1 | 5.83E−04 | 6.91E−04 | 6.20E−06 |
| AMFR | RAB31 | 3.22E−04 | 6.97E−04 | 7.85E−08 |
| ASGR2 | CIRBP | 6.12E−04 | 7.00E−04 | 4.53E−07 |
| IL2RB | HLADQA1 | 1.08E−05 | 7.16E−04 | 1.02E−08 |
| IL2RB | UBE2G2 | 7.87E−04 | 7.19E−04 | 3.22E−06 |
| ASGR2 | GOLGA8G /// | 2.18E−04 | 7.21E−04 | 1.08E−07 |
| | GOLGA8D /// | | | |
| | LOC388189 /// | | | |
| | GOLGA8E /// | | | |
| | GOLGA8C /// | | | |
| | GOLGA8F | | | |
| IL2RB | HIP1R | 2.50E−04 | 7.41E−04 | 6.31E−06 |
| ASGR2 | TCN1 | 1.09E−05 | 7.52E−04 | 1.17E−08 |
| IL2RB | C2ORF17 | 2.00E−05 | 7.56E−04 | 1.59E−08 |
| IL2RB | DHX34 | 5.38E−05 | 7.76E−04 | 7.76E−07 |
| RUNX3 | C16ORF68 | 3.81E−05 | 8.04E−04 | 4.76E−06 |
| ZAP70 | KIAA0690 | 3.81E−04 | 8.28E−04 | 2.65E−07 |
| HNRPH1 | DHX34 | 1.19E−04 | 8.47E−04 | 7.65E−07 |
| ASGR2 | PQLC1 | 6.91E−05 | 8.62E−04 | 8.70E−08 |
| IL2RB | BLR1 | 4.49E−06 | 8.90E−04 | 1.13E−07 |
| IL2RB | TSTA3 | 3.80E−04 | 8.99E−04 | 4.62E−06 |
| IL2RB | VTI1B | 5.48E−05 | 9.10E−04 | 1.46E−06 |
| TCF3 | RAB31 | 5.63E−07 | 9.45E−04 | 2.27E−06 |
| MTF1 | RFTN1 | 3.28E−04 | 9.49E−04 | 2.84E−06 |
| ZAP70 | HIST2H2AA /// | 2.90E−04 | 9.59E−04 | 2.96E−07 |
| | LOC653610 /// | | | |
| | H2AR | | | |
| ASGR2 | GTF3A | 1.32E−04 | 9.76E−04 | 9.90E−07 |

### The Three-Factor Signature and Overall Survival

[0110] To determine whether the two-gene signature, IL2RB+ASGR2, was an independent predictor of OS given established prognostic factors in metastatic melanoma, we performed a multivariable Cox PH regression analysis including the expression levels of each of the genes or that of the two-gene signature as well as baseline serum LDH levels or disease stage (M category). The results suggest that the two-gene signature was an independent predictor of OS in this context in the training, test, and pooled cohorts (Table 12). Each p-value is for a likelihood-ratio test comparing the full model to a model that excludes the corresponding variable. Similarly, expression of each of the individual genes that comprise the two-gene signature (Table 13) also was an independent predictor of OS given baseline serum LDH levels or disease stage (M Category) in the training, test, and pooled cohorts. The two-gene signature was also an independent predictor of OS when absolute lymphocyte count (ALC) at baseline or prior to the third ipilimumab dose was added to the multivariable Cox PH model (Table 14).

TABLE 12
Marginal tests of significance from
multivariable Cox PH regression

| | Coefficient | |
|---|---|---|
| Variable | Estimate | P Value |
| Training Cohort | | |
| LDH | 0.0012 | 0.042 |
| 2-Gene Signature | 0.82 | 1.3 × 10⁻⁶ |
| M1B vs M1A | −0.72 | 0.14 |
| M1C vs M1A | 0.26 | 0.55 |
| Test Cohort | | |
| LDH | 0.0025 | 1.9 × 10⁻⁴ |
| 2-Gene Signature | 0.54 | 5.5 × 10⁻⁴ |
| M1B vs M1A | 0.70 | 0.31 |
| M1C vs M1A | 0.95 | 0.011 |
| Both Cohorts Pooled | | |
| LDH | 0.0017 | 4.6 × 10⁻⁵ |
| 2-Gene Signature | 0.62 | 7.6 × 10⁻⁹ |
| M1B vs M1A | −0.23 | 0.55 |
| M1C vs M1A | 0.69 | 0.013 |

TABLE 13
Multivariable Cox PH regression showing that each key gene individually was an
independent predictor of OS, given both baseline LDH and M Category.

| IL2RB | | | ASGR2 | | | ASGR1 | | |
|---|---|---|---|---|---|---|---|---|
| | Coefficient | | | Coefficient | | | Coefficient | |
| Variable | Estimate | P Value | Variable | Estimate | P Value | Variable | Estimate | P Value |
| Training Cohort | | | Training Cohort | | | Training Cohort | | |
| LDH | 0.0019 | 8.8 × 10⁻⁴ | LDH | 0.0018 | 2.6 × 10⁻³ | LDH | 0.0016 | 1.2 × 10⁻² |
| IL2RB | −1.04 | 9 × 10⁻⁵ | ASGR2 | 0.45 | 1.7 × 10⁻² | ASGR1 | 0.81 | 1.1 × 10⁻² |
| M1B vs M1A | −0.64 | 0.19 | M1B vs M1A | −0.49 | 0.32 | M1B vs M1A | −0.47 | 0.33 |
| M1C vs M1A | 0.30 | 0.49 | M1C vs M1A | 0.49 | 0.25 | M1C vs M1A | 0.34 | 0.44 |
| Test Cohort | | | Test Cohort | | | Test Cohort | | |
| LDH | 0.0026 | 6.4 × 10⁻⁵ | LDH | 0.0025 | 1.2 × 10⁻⁴ | LDH | 0.0026 | 8.5 × 10⁻⁵ |
| IL2RB | −0.66 | 1.6 × 10⁻² | ASGR2 | 0.72 | 6.8 × 10⁻⁴ | ASGR1 | 0.61 | 5.2 × 10⁻² |
| M1B vs M1A | 0.48 | 0.48 | M1B vs M1A | 0.42 | 0.53 | M1B vs M1A | 0.33 | 0.62 |
| M1C vs M1A | 0.76 | 3.7 × 10⁻² | M1C vs M1A | 0.98 | 7.9 × 10⁻³ | M1C vs M1A | 0.86 | 1.8 × 10⁻² |
| Both Cohorts | | | Both Cohorts | | | Both Cohorts | | |
| Pooled | | | Pooled | | | Pooled | | |
| LDH | 0.0022 | 1.6 × 10⁻⁷ | LDH | 0.0019 | 3.5 × 10⁻⁶ | LDH | 0.00020 | 1.8 × 10⁻⁶ |
| IL2RB | −0.81 | 1.2 × 10⁻⁵ | ASGR2 | 0.55 | 5.7 × 10⁻⁵ | ASGR1 | 0.68 | 1.0 × 1.0⁻³ |
| M1B vs M1A | −0.36 | 0.33 | M1B vs M1A | −0.26 | 0.50 | M1B vs M1A | −0.16 | 0.68 |
| M1C vs M1A | 0.55 | 4.2 × 10⁻² | M1C vs M1A | 0.71 | 9.8 × 10⁻³ | M1C vs M1A | 0.62 | 2.2 × 10⁻² |

TABLE 14
Multivariable Cox PH regression showing that the two-gene
signature was an independent predictor of OS, given ALC
(at baseline or prior to dose 3), LDH, and M category.

| | | |
|---|---|---|
| | Coefficient | |
| Variable | Estimate | P Value |

Baseline ALC (ALC1)

| | | |
|---|---|---|
| Training Cohort | | |
| 2-Gene Signature | 0.846 | 3.2 × 10⁻⁶ |
| LDH | 0.0011 | 0.08 |
| ALC1 | 0.110 | 0.67 |
| M1B vs M1A | −0.701 | 0.16 |
| M1C vs M1A | 0.249 | 0.57 |
| Test Cohort | | |
| 2-Gene Signature | 0.522 | 0.0092 |
| LDH | 0.00288 | 0.033 |
| ALC1 | 0.209 | 0.34 |
| M1B vs M1A | 0.38 | 0.64 |
| M1C vs M1A | 1.06 | 0.019 |
| Both Cohorts Pooled | | |
| 2-Gene Signature | 0.65 | 1.4 × 10⁻⁷ |
| LDH | 0.00164 | 2.2 × 10⁻³ |
| ALC1 | 0.154 | 0.32 |
| M1B vs M1A | −0.152 | 0.71 |
| M1C vs M1A | 0.799 | 9.0 × 10⁻³ |

ALC Prior to Dose 3 (ALC3)

| | | |
|---|---|---|
| Training Cohort | | |
| 2-Gene Signature | 0.792 | 1.1 × 10⁻⁵ |
| LDH | 0.00112 | 0.075 |
| ALC3 | −0.127 | 0.56 |
| M1B vs M1A | −0.756 | 0.13 |
| M1C vs M1A | 0.204 | 0.64 |
| Test Cohort | | |
| 2-Gene Signature | 0.403 | 0.023 |
| LDH | 0.00249 | 0.069 |
| ALC3 | −0.385 | 0.065 |
| M1B vs M1A | 0.488 | 0.550 |
| M1C vs M1A | 0.852 | 0.046 |
| Both Cohorts Pooled | | |
| 2-Gene Signature | 0.572 | 9.9 × 10⁻⁷ |
| LDH | 0.00155 | 4.4 × 10⁻³ |
| ALC3 | −0.267 | 0.071 |
| M1B vs M1A | −0.338 | 0.39 |
| M1C vs M1A | 0.662 | 0.027 |

[0111] As it was established that LDH and the two-gene signature, IL2RB+ASGR2, were independent predictors of OS, it was next determined whether the two-gene signature could be improved by combining it with LDH to create a three-factor signature. Coefficients were estimated using Cox PH regression on the training cohort (0.00158 for LDH and 0.816 for the two-gene signature). The three-factor score for each patient could thus be calculated from the following equation: 0.00158*Y_{LDH}+0.816*(−1.312*X_{IL2RB}+0.748*X_{ASGR2}), where Yⱼ gives the concentration of factor j. Next the log-rank p-value was calculated for all possible thresholds. The threshold with the smallest p-value was −4.437 (FIG. 7B). The Kaplan-Meier curves were plotted for the training cohort (FIG. 2A), then the same coefficients and threshold were applied to the test cohort (FIG. 2B), yielding a log-rank p-value of p=1.74×10⁻⁵. The Kaplan-Meier plot for both cohorts pooled together appears in FIG. 2C.

[0112] It was next determined whether using two thresholds instead of one could provide better separation among survival curves. Using the three-factor signature described above with coefficients from the training cohort, two-threshold exploration was performed on the pooled cohort. Using thresholds at both −5.29 and −3.62 (FIG. 7C), three groups of patients were identified that corresponded to high, intermediate and low risk (FIG. 2D).

[0113] Time dependent ROC curves at 12 months were then plotted for both the two-gene signature (IL2RB+ASGR2) and the three-factor signature (IL2RB+ASGR2+LDH) in the training cohort (FIG. 2E), test cohort (FIG. 2F), and both cohorts pooled (FIG. 2G). These curves show that at best, baseline LDH only slightly improves predictive performance when added to the two-gene signature.

### Functional and Gene Set Enrichment Analysis

[0114] This study also sought to determine whether the various gene sets emerging in the above analyses were characteristic of particular blood cell types. Among the genes most highly correlated with IL2RB across the pooled training and test cohorts, the top two were PRF1 (perforin 1, probe 214617_at) (Spearman R=0.735, p=2.77×10⁻²⁸) and RUNX3 (runt-related transcription factor 3, probe 204197_s_at) (Spearman R=0.729, p=1.24×10⁻²⁷) (Table 5), genes that are highly interrelated, established to be associated with T-cells,^{22,23} and point clearly to underlying biological mechanisms (see Discussion). Also present among the 100 genes most correlated with IL2RB are a number of other genes established to be associated with T-cells including CD247,²⁴ LCK,²⁵ FYN,²⁵ ZAP70,²⁶ CBLB,²⁷ and TXK.²⁸ RUNX3, PRF1, and ZAP70 are also present on the list of genes associated with OS by univariate Cox regression with p<0.005. RUNX3 has been reported to induce transcription of PRF1 and EOMES (eomesodermin),²² which has been implicated in the regulation of IL2RB expression.²⁹ These analyses pointed to a role for EOMES as a central regulator of the expression of various genes in our model (FIG. 3A). Since there were no probes on the HT-HG-U133A 96-array for testing the expression of this gene, the expression of EOMES was tested separately by qPCR. There was significant association between the expression of EOMES and overall survival by both log-rank test (p=6.86×10⁻⁸) (FIG. 8) and univariate Cox regression (p=1.808×10⁻³). In addition, expression of key genes as determined by microarray were all highly correlated with EOMES expression (by qPCR) as determined by Spearman's rank correlation, including IL2RB (R=0.474, p=1.50×10⁻⁵), PRF1 (R=0.585, p=2.90×10⁻⁸), and RUNX3 (R=0.594, p=1.57×10⁻⁸).

[0115] Among the genes most highly correlated with ASGR2 are ASGR1, CD14 (cluster of differentiation 14, probe 201743_at) (Spearman R=0.588, p=3.75×10⁻¹⁶), and CD33 (cluster of differentiation 33, probe 206120_at) (Spearman R=0.457, p=1.34×10⁻⁹) (Table 5). CD14 expression is a characteristic of myeloid-derived suppressor cells (MDSCs) in melanoma patients,⁹ and CD33 expression is a characteristic of myeloid cells more generally.³⁰ Our cell type enrichment analysis found that among the 73 genes associated with OS by univariate Cox PH regression (p<0.005), the set of genes negatively associated with OS was most enriched in genes specific for CD14+ monocytes (P=2.17×10⁻⁷) (P values by hyper-geometric test as described in Methods), and also highly enriched in genes specific for CD33+ monocytes (P=2.62×10⁻⁴) as well as two types of granulocytes (Table 15). This is illustrated graphically (FIG. 3B, lower right) in a heat map of the DMAP¹⁸ expression data by cell type (columns) for the set of genes negatively associated with OS (rows).

TABLE 15
Enrichment of genes specific for particular cell types in the list of genes
negatively associated with OS, including adjusted hypergeometric P values.

| Cell Type | Score | P-value | Adjusted P-value |
|---|---|---|---|
| MONO2\|CD14+\|CD45dim | 36.64 | 1.11E−08 | 2.17E−07 |
| GRAN2\|CD34−\|SSChi\|CD45+\|CD11b+\|CD16− | 25.54 | 4.64E−07 | 6.04E−06 |
| MONO1\|CD34−\|CD33+\|CD13+ | 13.91 | 2.69E−05 | 2.62E−04 |
| GRAN3\|CD16+\|CD11b+ | 10.18 | 3.74E−03 | 2.91E−02 |

[0116] The set of genes positively associated with OS was most enriched in genes specific for two types of NK cells (CD56⁺CD16⁺CD3⁻, P=2.50×10⁻¹⁸ and CD56⁻CD16⁻CD3⁻, P=7.95×10⁻¹²) and two types of T cells (CD8⁺CD62L⁻CD45RA⁺, P=3.41×10⁻¹⁷ and CD8⁺CD62L⁻CD45RA⁻, P=8.05×10⁻¹⁴) (Table 16) (P values by hyper-geometric test as described in Methods). This is illustrated graphically (FIG. 3B, top and middle) in a heat map of the DMAP expression data¹⁸ by cell type (columns) for the set of genes positively associated with OS (rows).

TABLE 16
Enrichment of genes specific for particular cell types in the list of genes
positively associated with OS, including adjusted hypergeometric P values.

| Cell Type | Score | P-value | Adjusted P-value |
|---|---|---|---|
| NKA2\|CD56+\|CD16+\|CD3− | 53.89 | 1.28E−19 | 2.50E−18 |
| TCELLA1\|CD8+\|CD62L−\|CD45RA+ | 42.86 | 2.62E−18 | 3.41E−17 |
| TCELLA3\|CD8+\|CD62L−\|CD45RA− | 34.51 | 8.26E−15 | 8.05E−14 |
| NKA3\|CD56−\|CD16−\|CD3− | 41.42 | 1.02E−12 | 7.95E−12 |
| GRAN3\|CD16+\|CD11b+ | 32.67 | 3.37E−09 | 2.19E−08 |
| TCELLA4\|CD8+\|CD62L+\|CD45RA− | 15.54 | 8.98E−09 | 5.00E−08 |
| NKA4\|CD14−\|CD19−\|CD3+\|CD1d+ | 2.95 | 7.20E−06 | 3.51E−05 |
| MEGA2\|CD34−\|CD41+\|CD61+\|CD45− | 2.86 | 8.97E−04 | 3.89E−03 |
| GRAN1\|CD34−\|SSChi\|CD45+\|CD11b−\|CD16− | 9.78 | 1.65E−03 | 6.44E−03 |
| TCELLA2\|CD8+\|CD62L+\|CD45RA+ | 9.80 | 1.98E−03 | 7.01E−03 |
| TCELLA7\|CD4+\|CD62L−\|CD45RA− | 5.12 | 2.38E−03 | 7.73E−03 |

[0117] Taken together, these analyses suggest that greater expression of genes more highly expressed in natural killer (NK) and T-cells (such as IL2RB) was associated with longer survival, while greater expression of genes expressed in CD14⁺ cells and other myeloid lineage cells (such as ASGR1 and ASGR2) was associated with shorter survival (FIG. 3C).

### Discussion

[0118] Ongoing research aims to discover biomarkers that could select patients with an enhanced benefit/risk profile. Whereas ipilimumab has shown significant survival benefit in a subset of metastatic melanoma patients, in some patients the treatment can result in adverse events. Thus, identification of biomarkers that can predict a patient's response and are easily measured in peripheral blood is important. In the present study, a novel approach was used to identify blood gene-signatures that may predict OS in metastatic melanoma patients receiving ipilimumab.

[0119] When using microarray data to develop predictive gene-signatures there is a high likelihood of developing a signature that may be strongly associated with OS in a training cohort, but not significantly associated with OS in a test cohort, due to over-fitting in the training cohort. Signatures consisting of large numbers of genes are more likely to suffer from over-fitting and are less practical in the clinical context.

[0120] Using gene expression microarray data from a training cohort of 88 patients, two independent methods were applied to evaluate association of gene expression with OS. Results from both methods pointed to a lead two-gene signature of IL2RB+ASGR2 that was highly associated with OS in the training cohort. Using these two genes, a signature was calculated that included two coefficients and a threshold in the training cohort, and it was determined that the same signature was also significantly associated with OS in an independent test cohort of 69 patients (p<0.001). The signature also had strong predictive performance in the independent test cohort (AUC=0.818 for a time-dependent ROC curve at 12 months).

[0121] The size of the signature is noteworthy. While signatures comprised of many genes carry risk of over-fitting, a two-gene signature significantly mitigates this risk. Adding additional genes improved the signature incrementally, but in this study, the majority of the predictive power came from the combination of two top genes, IL2RB and ASGR2.

[0122] Mechanistic investigation of the two genes with expression most highly correlated with that of IL2RB (RUNX3 and PRF1) yielded insights into its underlying biology. RUNX3 has been reported to induce transcription of PRF1 and EOMES (eomesodermin),²² which has been implicated in the regulation of IL2RB expression.²⁹ Based on the high correlation between IL2RB, RUNX3, and PRF1 expression and the mechanistic linkage between EOMES, RUNX3 and IL2RB, it may be hypothesized that EOMES is a core transcription factor that underlies the observed coexpression of IL2RB, RUNX3 and PRF1 in the data. Further analyses of EOMES by qPCR supported this notion, as we found strong correlation of the expression levels of EOMES and other genes in our model. Greater baseline expression levels of this gene were also associated with longer survival in the data set. Moreover, a direct relationship between EOMES and CTLA-4 has been established,³¹ as well as interactions between EOMES and IFNγ,²² the factor underlying many of the tumor chemokine changes linked with ipilimumab response (FIG. 3A).³

[0123] Mechanistic investigation of ASGR2 linked it to myeloid cells and particularly MDSCs, as its expression was highly correlated with the MDSC surface markers CD14 and CD33.^{9,30} MDSCs have the capacity to suppress both the cytotoxic activities of natural killer (NK) and natural killer T (NKT) cells, and the adaptive immune response mediated by CD4⁺ and CD8⁺ T cells. MDSCs act through multiple pathways including upregulation of nitric oxide synthase 2 (NOS2) and production of arginase 1 (ARG1). ARG1 and NOS2 metabolize L-arginine and either together, or separately, block translation of the T cell CD3 zeta chain, inhibit T cell proliferation, and promote T cell apoptosis.³² Additionally, MDSCs are believed to secrete immunosuppressive cytokines such as TGFβ and induce regulatory T cell development.³⁰ High frequency of MDSCs have been reported in the peripheral blood of patients affected by breast, lung, renal and head and neck carcinomas³³ and in melanoma.³⁴

[0124] While in this study gene expression was mainly measured via microarray, it may also be assayed via quantitative polymerase chain reaction (qPCR). Moreover, IL2RB and ASGR2 are both cell surface markers and therefore may be detected via flow cytometry. The magnitude of the two-gene signature may change over time in a given patient (either inherently or in response to additional therapies such as a CD137-agonist), and may be monitored to determine the best times to administer or re-administer ipilimumab.

### REFERENCES

[0125] 1. Hodi F S, O'Day S J, McDermott D F, et al. Improved survival with ipilimumab in patients with metastatic melanoma. N Engl J Med 2010; 363:711-723.
[0126] 2. Robert C, Thomas L, Bondarenko I, et al. Ipilimumab plus Dacarbazine for Previously Untreated Metastatic Melanoma. N Engl J Med 2011; 364:2517-2526.
[0127] 3. Ji R-R, Chasalow S D, Wang L, et al. An immune-active tumor microenvironment favors clinical response to ipilimumab. Cancer Immunol Immunother 2011.
[0128] 4. Berman D M, Wolchok J, Weber J, et al. Association of peripheral blood absolute lymphocyte count (ALC) and clinical activity in patients (pts) with advanced melanoma treated with ipilimumab. ASCO Annual Meeting 2009; Abs 3020.
[0129] 5. Weber J S, Yu B, Hall D, et al. Pharmacodynamic and predictive markers of ipilimumab on melanoma patients' T-cells. ASCO Annual Meeting 2011; Abs 2503.
[0130] 6. Chen H, Liakou C I, Kamat A, et al. Anti-CTLA-4 therapy results in higher CD4⁺ICOS^{hi} T cell frequency and IFN-γ levels in both nonmalignant and malignant prostate tissues. Proc Natl Acad Sci USA 2009; 106:2729-2734.
[0131] 7. Yuan J, Gnjatic S, Li H, et al. CTLA-4 blockade enhances polyfunctional NY-ESO-1 specific T cell responses in metastatic melanoma patients with clinical benefit. Proc Natl Acad Sci USA 2008; 105:20410-20415.
[0132] 8. Yuan J, Adamow M, Ginsberg B A, et al. Integrated NY-ESO-1 antibody and CD8⁺ T-cell responses correlate with clinical benefit in advanced melanoma patients treated with ipilimumab. Proc Natl Acad Sci USA 2011.
[0133] 9. Kitano S, Postow M A, Cortez C, et al. Myeloid-derived supressor cell quantity prior to treatment with ipilimumab at 10 mg/kg to predict for overall survival in patients with metastatic melanoma. ASCO Annual Meeting 2012; Abs 2518.
[0134] 10. Weber J, Thompson J A, Hamid O, et al.: A randomized, double-blind, placebo-controlled, phase II study comparing the tolerability and efficacy of ipilimumab administered with or without prophylactic budesonide in patients with unresectable stage III or IV melanoma. Clin Cancer Res. 2009, 15:5591-5598.
[0135] 11. Hamid O, Schmidt H, Nissan A, et al.: A prospective phase II trial exploring the association between tumor microenvironment biomarkers and clinical activity of ipilimumab in advanced melanoma. J. Translational Medicine. 2011; 9:204.
[0136] 12. Irizarry R A, Bolstad B M, Collin F, et al Summaries of Affymetrix GeneChip probe level data. Nucleic Acids Research, 2003; 31 (4):e15.
[0137] 13. Gentleman R C, Carey V J, Bates D M, et al. Bioconductor: open software development for computational biology and bioinformatics. Genome Biology. 2005, 5:R80.
[0138] 14. Miller J A, Cai C, Langfelder P, et al. Strategies for aggregating gene expression data: The collapseRows R function. BMC Bioinformatics, 2011; 12:322.
[0139] 15. Friedman J, Hastie T, Tibshirani R. Regularization paths for generalized linear models via coordinate descent. J Stat Soft 2010; 33.
[0140] 16. Kaplan E L, Meier P. Nonparametric estimation from incomplete observations. J. Amer. Statist. Assn. 1958; 53:457-481.
[0141] 17. Balch C M, Gershenwald J E, Soong S, et al. Final version of 2009 AJCC melanoma staging and classification. J Clin Oncol 2009; 27:6199-6206.
[0142] 18. Novershtern N, Subramanian A, Lawton L N, et al. Densely interconnected transcriptional circuits control cell states in human hematopoiesis. Cell 2011; 144:296-309.
[0143] 19. Benita Y, Cao Z, Giallourakis C, et al. Gene enrichment profiles reveal T-cell development, differentiation, and lineage-specific transcription factors including ZBTB25 as a novel NF-AT repressor. Blood 2010; 115:5376-5384.
[0144] 20. Harris R L, van den Berg C W, and Bowen D J. ASGR1 and ASGR2, the Genes that Encode the Asialoglycoprotein Receptor (Ashwell Receptor), Are Expressed in Peripheral Blood Monocytes and Show Interindividual Differences in Transcript Profile. Molecular Biology International 2012; 283974.
[0145] 21. Heagerty P J, Lumley T, Pepe M S. Time-Dependent ROC Curves for Censored Survival Data and a Diagnostic Marker. Biometrics 2000; 56:337-344.
[0146] 22. Cruz-Guilloty F, Pipkin M E, Djuretic I M, et al. Runx3 and T-box proteins cooperate to establish the transcriptional program of effector CTLs. J Exp Med 2009; 206:51-59.
[0147] 23. Voskoboinik I, Smyth M J, Trapani J A. Perforin-mediated target-cell death and immune homeostasis. Nat Rev Immunol. 2006; 6 (12):940-52.
[0148] 24. Lundholm M, Mayans S, Motta V, et al. Variation in the Cd3 zeta (Cd247) gene correlates with altered T cell activation and is associated with autoimmune diabetes. J Immunol 2010; 184 (10):5537-44.
[0149] 25. Filipp D, Ballek O, Manning J. Lck, Membrane Microdomains, and TCR Triggering Machinery: Defining the New Rules of Engagement. Front Immunol. 2012; 3:155.
[0150] 26. Yokosuka T, Sakata-Sogawa K, Kobayashi W, et al. Newly generated T cell receptor microclusters initiate and sustain T cell activation by recruitment of Zap70 and SLP-76. Nat Immunol. 2005 December; 6 (12):1253-62.
[0151] 27. Teh C E, Daley S R, Enders A, et al. T-cell regulation by casitas B-lineage lymphoma (Cblb) is a critical failsafe against autoimmune disease due to autoimmune regulator (Aire) deficiency. Proc Natl Acad Sci USA. 2010; 107(33):14709-14.
[0152] 28. Sahu N, Venegas A M, Jankovic D, et al. Selective expression rather than specific function of Txk and Itk regulate Th1 and Th2 responses. J Immunol. 2008 Nov. 1; 181 (9):6125-31.
[0153] 29. Intlekofer A M, Takemoto N, Wherry E J, et al. Effector and memory CD8⁺ T cell fate coupled by T-bet and eomesodermin. Nat Immunol 2005; 6:1236-1244.
[0154] 30. Lechner, M G, Liebertz D J, Epstein A L. Characterization of Cytokine-Induced Myeloid-Derived Suppressor Cells from Normal Human Peripheral Blood Mononuclear Cells. J Immunol 2010; 185:2273-2284.
[0155] 31. Hegel J K, Knieke K, Kolar P, et al. CD152 (CTLA-4) regulates effector functions of CD8⁺ T lymphocytes by repressing Eomesodermin. Eur J Immunol 2009; 39:883-893.
[0156] 32. Bronte V, Serafini P, Mazzoni A, et al. L-arginine metabolism in myeloid cells controls T-lymphocyte functions. Trends Immunol. 2003; 24 (6):302-306.
[0157] 33. Talmadge J E. Pathways mediating the expansion and immunosuppressive activity of myeloid-derived suppressor cells and their relevance to cancer therapy. Clin Cancer Res. 2007; 13 (18 Pt 1):5243-8.
[0158] 34. Filipazzi P, Valenti R, Huber V, et al. Identification of a new subset of myeloid suppressor cells in peripheral blood of melanoma patients with modulation by a granulocyte-macrophage colony-stimulation factor-based antitumor vaccine. J Clin Oncol. 2007; 25 (18):2546-53.

TABLE 17
Probe Sets

| Target Name | Probe Set ID | SEQ ID NO. | Probe Sequences | Target Sequence | Target Genbank ID |
|---|---|---|---|---|---|
| SLC25A3 | 200030_s_at | 1 | TCATCATGATTGGTACCCTGACTGC | acaccatgatgaagttcgcctgctttgaacgtactgttgaagcactgtacaag | NM_002635.1 |
| | | | | tttgtggttcctaagccccgcagtgaatgttcaaagccagagcagctggttgt | |
| | | | | aacatttgtagcaggttacatagctggagtcttttgtgcaattgtttctcacc | |
| | | | | ctgctgattctgtggtatctgtgttgaataaagaaaaaggtagcagtgcttct | |
| | | | | ctggtcctcaagagacttggatttaaaggtgtatggaagggactgtttgcccg | |
| | | | | tatcatcatgattggtaccctgactgcactacagtggtttatctatgactccgtgaag | |
| | | | | gtctacttcagacttcctc | |
| | | 2 | GTACCCTGACTGCACTACAGTGGTT | | |
| | | 3 | GTGGTTTATCTATGACTCCGTGAAG | | |
| | | 4 | GTGAAGGTCTACTTCAGACTTCCTC | | |
| | | 5 | ACACCATGATGAAGTTCGCCTGCTT | | |
| | | 6 | TCGCCTGCTTTGAACGTACTGTTGA | | |
| | | 7 | TGTACAAGTTTGTGGTTCCTAAGCC | | |
| | | 8 | TCCTAAGCCCCGCAGTGAATGTTCA | | |
| | | 9 | ACCCTGCTGATTCTGTGGTATCTGT | | |
| | | 10 | AAAGGTAGCAGTGCTTCTCTGGTCC | | |
| | | 11 | GTGCTTCTCTGGTCCTCAAGAGACT | | |
| NONO | 200057_s_at | 12 | GCCCCAGAGAAACTGCCACATACAC | gccccagagaaactgccacatacaccacaaaaaccaaacatgccccaatgacc | NM_007363.2 |
| | | | | ttagccccattgctccattcactcccaggtgagaattcaggcaaacgtccaca | |
| | | | | aaggtcacaggcagcgtacatacggttctgttataccccatatattacccctt | |
| | | | | catgtcctaaagaagacattttctcttagagattttcattttagtgtatcttt | |
| | | | | aaaaaaaaaatcttgtgttaacttgcctccatctttttcttggggtgagggac | |
| | | | | accagggaatgacccttttgtgtctatgatgttgctgttcacagcttttcttg | |
| | | | | ataggcctagtacaatcttgggaacagggttactgtatactgaaggtctgaca | |
| | | | | gtagctcttagactcgcctatcttaggtagtcatgctgtgcattttttttttcattggt | |
| | | | | gtactgtgtttgatttgtctca | |
| | | 13 | GCTCCATTCACTCCCAGGTGAGAAT | | |
| | | 14 | GGCAAACGTCCACAAAGGTCACAGG | | |
| | | 15 | AGGTCACAGGCAGCGTACATACGGT | | |
| | | 16 | CATACGGTTCTGTTATACCCCATAT | | |
| | | 17 | TATTACCCCTTCATGTCCTAAAGAA | | |
| | | 18 | AAATCTTGTGTTAACTTGCCTCCAT | | |
| | | 19 | GGAATGACCCTTTTGTGTCTATGAT | | |
| | | 20 | CACAGCTTTTCTTGATAGGCCTAGT | | |
| | | 21 | TGACAGTAGCTCTTAGACTCGCCTA | | |
| | | 22 | GGTGTACTGTGTTTGATTTGTCTCA | | |
| RNPS1 | 200060_s_at | 23 | CAGGGAAAAGTGAGGCTCTTGGGGG | cagggaaaagtgaggctcttgggggtggtttgaccctgcttacctgggagcac | BC001659.1 |
| | | | | acttttcccttccccgatgacctgggatggtggccaggccgtgcccttgctgt | |
| | | | | tgctgggcagtgtccttttggaaagggagctgccccaggctttagtgcagctg | |
| | | | | ccaaccctgttaggcctggcctctcgaggcctcttctgatctcaagggtcaca | |
| | | | | ccccctcaaagatcctctcacccatggtagttgctgctcgtggttctgtctgt | |
| | | | | ccgtgcaccgatgcacacaccgcaccccaccactgtactctgaaattggcgag | |
| | | | | tgagtggagagccagctctgcggagtcatcacgcagccatggttgtgcctgcc | |
| | | | | gttcatggtggtctttcaggttatcttggcaacatgtacattgcttttatttt | |
| | | | | ttttcttttttgctttcattgtacagtcagtactataaaatttctcttttgagtttta | |
| | | | | tacctttgtagcattttagatgacattgtgtttgtactttgttg | |
| | | 24 | TTACCTGGGAGCACACTTTTCCCTT | | |
| | | 25 | CCTTCCCCGATGACCTGGGATGGTG | | |
| | | 26 | CCCCGATGACCTGGGATGGTGGCCA | | |
| | | 27 | CCCACCACTGTACTCTGAAATTGGC | | |
| | | 28 | CACTGTACTCTGAAATTGGCGAGTG | | |
| | | 29 | CCGTTCATGGTGGTCTTTCAGGTTA | | |
| | | 30 | GGTGGTCTTTCAGGTTATCTTGGCA | | |
| | | 31 | GGTCTTTCAGGTTATCTTGGCAACA | | |
| | | 32 | TCAGGTTATCTTGGCAACATGTACA | | |
| | | 33 | ATGACATTGTGTTTGTACTTTGTTG | | |
| HSP90AB1 | 200064_at | 34 | AATAGACTTGTGTCTTCACCTTGCT | aatagacttgtgtcttcaccttgctgcattgtgaccagcacctacggctggac | AF275719.1 |
| | | | | agccaatatggagcggatcatgaaagcccaggcacttcgggacaactccacca | |
| | | | | tgggctatatgatggccaaaaagcacctggagatcaaccctgaccaccccatt | |
| | | | | gtggagacgctgcggcagaaggctgaggccgacaagaatgataaggcagttaa | |
| | | | | ggacctggtggtgctgctgtttgaaaccgccctgctatcttctggcttttccc | |
| | | | | ttgaggatccccagacccactccaaccgcatctatcgcatgatcaagctaggt | |
| | | | | ctaggtattgatgaagatgaagtggcagcagaggaacccaatgctgcagttcc | |
| | | | | tgatgagatcccccctctcgagggcgatgaggatgcgtctcgcatggaagaagtcgat | |
| | | | | taggttaggagttcatagttggaaaacttgtgcccttgtatagtgtccc | |
| | | 35 | GTCTTCACCTTGCTGCATTGTGACC | | |
| | | 36 | GTGACCAGCACCTACGGCTGGACAG | | |
| | | 37 | GAGCGGATCATGAAAGCCCAGGCAC | | |
| | | 38 | AAAAGCACCTGGAGATCAACCCTGA | | |
| | | 39 | TGGTGGTGCTGCTGTTTGAAACCGC | | |
| | | 40 | CAACCGCATCTATCGCATGATCAAG | | |
| | | 41 | GCAGAGGAACCCAATGCTGCAGTTC | | |
| | | 42 | TCCCCCCTCTCGAGGGCGATGAGGA | | |
| | | 43 | GGGCGATGAGGATGCGTCTCGCATG | | |
| | | 44 | AACTTGTGCCCTTGTATAGTGTCCC | | |
| SLC25A5 | 200657_at | 45 | TAACACAATCTTGAGCATTCTTGAC | cctacttcggtatctatgacactgcaaagggaatgcttccggatcccaagaac | NM_001152.1 |
| | | | | actcacatcgtcatcagctggatgatcgcacagactgtcactgctgttgccgg | |
| | | | | gttgacttcctatccatttgacaccgttcgccgccgcatgatgatgcagtcag | |
| | | | | ggcgcaaaggaactgacatcatgtacacaggcacgcttgactgctggcggaag | |
| | | | | attgctcgtgatgaaggaggcaaagcttttttcaagggtgcatggtccaatgt | |
| | | | | tctcagaggcatgggtggtgcttttgtgcttgtcttgtatgatgaaatcaaga | |
| | | | | agtacacataagttatttcctaggatttttccccctgtgaacaggcatgttgt | |
| | | | | attctataacacaatcttgagcattcttgacagactcctggctgtcagtttctcagtg | |
| | | | | gcaac | |
| | | 46 | CATTCTTGACAGACTCCTGGCTGTC | | |
| | | 47 | TGGCTGTCAGTTTCTCAGTGGCAAC | | |
| | | 48 | CCTACTTCGGTATCTATGACACTGC | | |
| | | 49 | GGGAATGCTTCCGGATCCCAAGAAC | | |
| | | 50 | CAAGAACACTCACATCGTCATCAGC | | |
| | | 51 | ATGATCGCACAGACTGTCACTGCTG | | |
| | | 52 | GCTGGCGGAAGATTGCTCGTGATGA | | |
| | | 53 | GGGTGCATGGTCCAATGTTCTCAGA | | |
| | | 54 | GAGGCATGGGTGGTGCTTTTGTGCT | | |
| | | 55 | TGCTTTTGTGCTTGTCTTGTATGAT | | |
| GRN | 200678_x_at | 56 | CGTAGCCCTCACGTGGGTGTGAAGG | cgtagccctcacgtgggtgtgaaggacgtggagtgtggggaaggacacttctg | NM_002087.1 |
| | | | | ccatgataaccagacctgctgccgagacaaccgacagggctgggcctgctgtc | |
| | | | | cctaccgccagggcgtctgttgtgctgatcggcgccactgctgtcctgctggc | |
| | | | | ttccgctgcgcagccaggggtaccaagtgtttgcgcagggaggccccgcgctg | |
| | | | | ggacgcccctttgagggacccagccttgagacagctgctgtgagggacagtac | |
| | | | | tgaagactctgcagccctcgggaccccactcggagggtgccctctgctcaggc | |
| | | | | ctccctagcacctccccctaaccaaattctccctggaccccattctgagctcc | |
| | | | | ccatcaccatgggaggtggggcctcaatctaaggccttccctgtcagaagggg | |
| | | | | gttgtggcaaaagccacattacaagctgccatcccctccccgtttcagtggac | |
| | | | | cctgtggccaggtgcttttccctatccacaggggtgtttgtgtgtgtgcgcgtgtgc | |
| | | | | gtttcaata | |
| | | 57 | GAAGGACACTTCTGCCATGATAACC | | |
| | | 58 | TGCCATGATAACCAGACCTGCTGCC | | |
| | | 59 | GCCGAGACAACCGACAGGGCTGGGC | | |
| | | 60 | GCCAGGGGTACCAAGTGTTTGCGCA | | |
| | | 61 | GACCCAGCCTTGAGACAGCTGCTGT | | |
| | | 62 | CAGTACTGAAGACTCTGCAGCCCTC | | |
| | | 63 | TGAGCTCCCCATCACCATGGGAGGT | | |
| | | 64 | TGGGGCCTCAATCTAAGGCCTTCCC | | |
| | | 65 | AAAGCCACATTACAAGCTGCCATCC | | |
| | | 66 | GTGTGTGCGCGTGTGCGTTTCAATA | | |
| CCND2 | 200953_s_at | 67 | GCCATTACAGTATCCAATGTCTTTT | gccattacagtatccaatgtcttttgacaggtgcctgtccttgaaaaacaaag | NM_001759.1 |
| | | | | tttctatttttatttttaattggtttagttcttaactgctggccaactcttac | |
| | | | | atccccagcaaatcatcgggccattggattttttccattatgttcatcaccct | |
| | | | | tatatcatgtacctcagatctctctctctctcctctctctcagttatatagtt | |
| | | | | tcttgtcttggactttttttttcttttctttttctttttttttttgctttaaa | |
| | | | | acaagtgtgatgccatatcaagtccatgttattctctcacagtgtactctata | |
| | | | | agaggtgtgggtgtctgtttggtcaggatgttagaaagtgctgataagtagca | |
| | | | | tgatcagtgtatgcgaaaaggtttttaggaagtatggcaaaaatgttgtattg | |
| | | | | gctatgatggtgacatgatatagtcagctgccttttaagaggtcttatctgttcagtg | |
| | | | | tt | |
| | | 68 | GTTTAGTTCTTAACTGCTGGCCAAC | | |
| | | 69 | CTTACATCCCCAGCAAATCATCGGG | | |
| | | 70 | TATGTTCATCACCCTTATATCATGT | | |
| | | 71 | TTATATCATGTACCTCAGATCTCTC | | |
| | | 72 | TCTCCTCTCTCTCAGTTATATAGTT | | |
| | | 73 | GTGTGATGCCATATCAAGTCCATGT | | |
| | | 74 | AGTCCATGTTATTCTCTCACAGTGT | | |
| | | 75 | GGTGTGGGTGTCTGTTTGGTCAGGA | | |
| | | 76 | ATGTTGTATTGGCTATGATGGTGAC | | |
| | | 77 | TAAGAGGTCTTATCTGTTCAGTGTT | | |
| TXNIP | 201010_s_at | 78 | GTGTTCTCCTACTGCAAATATTTTC | gtgttctcctactgcaaatattttcatatgggaggatggttttctcttcatgt | NM_006472.1 |
| | | | | aagtccttggaattgattctaaggtgatgttcttagcactttaattcctgtca | |
| | | | | aattttttgttctccccttctgccatcttaaatgtaagctgaaactggtctac | |
| | | | | tgtgtctctagggttaagccaaaagacaaaaaaaattttactacttttgagat | |
| | | | | tgccccaatgtacagaattatataattctaacgcttaaatcatgtgaaagggt | |
| | | | | tgctgctgtcagccttgcccactgtgacttcaaacccaaggaggaactcttga | |
| | | | | tcaagatgcccaaccctgtgatcagaacctccaaatactgccatgagaaacta | |
| | | | | gagggcaggtgttcataaaagccctttgaacccccttcctgccctgtgttagg | |
| | | | | agatagggatattggcccctcactgcagctgccagcacttggtcagtcactct | |
| | | | | cagccatagcactttgttcactgtcctgtgtcagagcactgagctccacccttttctg | |
| | | | | agagttat | |
| | | 79 | GGTTTTCTCTTCATGTAAGTCCTTG | | |
| | | 80 | TGTTCTTAGCACTTTAATTCCTGTC | | |
| | | 81 | GCTGAAACTGGTCTACTGTGTCTCT | | |
| | | 82 | GAAAGGGTTGCTGCTGTCAGCCTTG | | |
| | | 83 | CAACCCTGTGATCAGAACCTCCAAA | | |
| | | 84 | AGATAGGGATATTGGCCCCTCACTG | | |
| | | 85 | CACTCTCAGCCATAGCACTTTGTTC | | |
| | | 86 | ACTTTGTTCACTGTCCTGTGTCAGA | | |
| | | 87 | TGTGTCAGAGCACTGAGCTCCACCC | | |
| | | 88 | AGCTCCACCCTTTTCTGAGAGTTAT | | |
| RBBP7 | 201092_at | 89 | GCAGAAGATGGGCCTCCAGAACTCC | gcagaagatgggcctccagaactcctgtttattcatggaggacacactgctaa | NM_002893.2 |
| | | | | gatttcagattttagctggaaccccaatgagccttgggtcatttgctcagtgt | |
| | | | | ctgaggataacatcatgcagatatggcaaatggctgaaaatatttacaatgat | |
| | | | | gaagagtcagatgtcacgacatccgaactggagggacaaggatcttaaaccca | |
| | | | | aagtacgagaaatgtttctgttgaatgtaatgctacatgaatgcttgatttat | |
| | | | | caagcgccaaaaaggcattgtatagtaggaaatgtaagtggggtggcttatgg | |
| | | | | cttctttatcctctgattctagcactttcaagtgagctgttgcgtactgtatc | |
| | | | | atattgtagctattagggaagagaagaatgttgcttaagaaagaacatcacca | |
| | | | | ttgattttaaatacaagtagcagggtattgcctttgattcaactgttttaagtcctca | |
| | | | | ttttctcaaactaagtgcttgctgtt | |
| | | 90 | TATTCATGGAGGACACACTGCTAAG | | |
| | | 91 | TTAGCTGGAACCCCAATGAGCCTTG | | |
| | | 92 | AGCCTTGGGTCATTTGCTCAGTGTC | | |
| | | 93 | GTCACGACATCCGAACTGGAGGGAC | | |
| | | 94 | TGGGGTGGCTTATGGCTTCTTTATC | | |
| | | 95 | TTATCCTCTGATTCTAGCACTTTCA | | |
| | | 96 | GTGAGCTGTTGCGTACTGTATCATA | | |
| | | 97 | GTAGCAGGGTATTGCCTTTGATTCA | | |
| | | 98 | CAACTGTTTTAAGTCCTCATTTTCT | | |
| | | 99 | TTTCTCAAACTAAGTGCTTGCTGTT | | |
| LGALS1 | 201105_at | 100 | AAACCTGGAGAGTGCCTTCGAGTGC | ctcctggactcaatcatggcttgtggtctggtcgccagcaacctgaatctcaa | NM_002305.2 |
| | | | | acctggagagtgccttcgagtgcgaggcgaggtggctcctgacgctaagagct | |
| | | | | tcgtgctgaacctgggcaaagacagcaacaacctgtgcctgcacttcaaccct | |
| | | | | cgcttcaacgcccacggcgacgccaacaccatcgtgtgcaacagcaaggacgg | |
| | | | | cggggcctgggggaccgagcagcgggaggctgtctttcccttccagcctggaa | |
| | | | | gtgttgcagaggtgtgcatcaccttcgaccaggccaacctgaccgtcaagctg | |
| | | | | ccagatggatacgaattcaagttccccaaccgcctcaacctggaggccatcaactaca | |
| | | | | tggcagctgacggtgacttcaa | |
| | | 101 | GTGCCTTCGAGTGCGAGGCGAGGTG | | |
| | | 102 | CTCCTGACGCTAAGAGCTTCGTGCT | | |
| | | 103 | GCTTCGTGCTGAACCTGGGCAAAGA | | |
| | | 104 | TGTGCAACAGCAAGGACGGCGGGGC | | |
| | | 105 | ACCGAGCAGCGGGAGGCTGTCTTTC | | |
| | | 106 | GACCGTCAAGCTGCCAGATGGATAC | | |
| | | 107 | ACATGGCAGCTGACGGTGACTTCAA | | |
| | | 108 | CTCCTGGACTCAATCATGGCTTGTG | | |
| | | 109 | ATCATGGCTTGTGGTCTGGTCGCCA | | |
| | | 110 | GTCGCCAGCAACCTGAATCTCAAAC | | |
| ITPR3 | 201189_s_at | 111 | ACAGTCCTGCTTAGAGCCCTTAAAA | acagtcctgcttagagcccttaaaaagacttgaaagttcactgggactcagtt | NM_002224.1 |
| | | | | taccttaatgccttagcagaagataaatcctacctagagacctttgttcctta | |
| | | | | aagcaataactgacaactctttgtagtcctccttgtgggtagttaagagtggg | |
| | | | | gtcacccctttaactccaagcactacattttggcggctgcggcctctggggga | |
| | | | | ggtggcagttatgctgttactagtgattttagggctttgttatttaacttatt | |
| | | | | tcaagggtgctgtgctcagccctgcccatggctgtgcagctccctccgtgcct | |
| | | | | cagatctgctgtagccagtgcagacctcactgtcgtgtccatgccacccccgg | |
| | | | | catggctccaggtggcctggtgactccatgatggacgatcttgctcccaggac | |
| | | | | ctgcctcttcccaggcttcctggggaagagttgtacgcccaggcaacaagggctgag | |
| | | | | ctgcgcttgcgtggctgtttcatgaccgc | |
| | | 112 | GGACTCAGTTTACCTTAATGCCTTA | | |
| | | 113 | TAAATCCTACCTAGAGACCTTTGTT | | |
| | | 114 | AACTGACAACTCTTTGTAGTCCTCC | | |
| | | 115 | GGGAGGTGGCAGTTATGCTGTTACT | | |
| | | 116 | TGCCTCAGATCTGCTGTAGCCAGTG | | |
| | | 117 | GCTGTAGCCAGTGCAGACCTCACTG | | |
| | | 118 | CTCCAGGTGGCCTGGTGACTCCATG | | |
| | | 119 | CCATGATGGACGATCTTGCTCCCAG | | |
| | | 120 | GGGGAAGAGTTGTACGCCCAGGCAA | | |
| | | 121 | GCTTGCGTGGCTGTTTCATGACCGC | | |
| SPCS2 | 201240_s_at | 122 | GTATAGCTTTGGGCCATGTAGCATT | gagaagttgtagctctgatgtctagctgtagtctccttgatctgctgattgca | NM_014752.1 |
| | | | | ttattttaatttgcttttctgggaaagcagttttgctaaaagctgtacagact | |
| | | | | ttttcttttgtacctagcagtactttatatagtatagctttgggccatgtagc | |
| | | | | attttaagactcaattttaaaaaattattaatctgttgctgactcttaattcc | |
| | | | | tatttcaatatgtgtttccttgaagaattcaggatacaacttcttgtgtatga | |
| | | | | cagctttccttcacacactatttttgtgggtgtgtatatatctgatttgggaa | |
| | | | | gaatttaaaaaacacatagctttttaatttgtttgaaacagactttctgcctg | |
| | | | | ttacatttttgcttttaaccaattaaagaagccaatggcattttagttttatattgt | |
| | | | | gttttccactagtatatccctgttgatttgtttgtgccttt | |
| | | 123 | AAATTATTAATCTGTTGCTGACTCT | | |
| | | 124 | GTTGCTGACTCTTAATTCCTATTTC | | |
| | | 125 | GTGTATGACAGCTTTCCTTCACACA | | |
| | | 126 | TCCTTCACACACTATTTTTGTGGGT | | |
| | | 127 | GACTTTCTGCCTGTTACATTTTTGC | | |
| | | 128 | GTGTTTTCCACTAGTATATCCCTGT | | |
| | | 129 | TCCCTGTTGATTTGTTTGTGCCTTT | | |
| | | 130 | GAGAAGTTGTAGCTCTGATGTCTAG | | |
| | | 131 | GATGTCTAGCTGTAGTCTCCTTGAT | | |
| | | 132 | GTCTCCTTGATCTGCTGATTGCATT | | |
| TMEM109 | 201361_at | 133 | GAGCAGTCACTCTCAGAATCTTGAT | gagcagtcactctcagaatcttgattccccatcagccaaagcaaaagatggct | NM_024092.1 |
| | | | | gctgctttgtaggcatgtgcctgcaagtgggaccttgctgggcattatatgcc | |
| | | | | ctgtgggggtttcagagaccctgaaagaggagggaggacccgcctccttgtct | |
| | | | | gcacaactgcatgcacttctctccccatcgctccacaacctgaaaccgagaag | |
| | | | | gagttgctgaccagtgcccaccccggcagcccgggaggaacacaggcagctcc | |
| | | | | tttcccttcacgtggtctgcagagagcagggtgagctgccagctgcccctctc | |
| | | | | caccagggtaccctgtcttggtggttaggggccacttttcctttgaggctcta | |
| | | | | gtggaggtggatgtccttctctgccaggcttggcacatgatgtgaagaataaatgcc | |
| | | | | caattcttactgttcaggt | |
| | | 134 | TCAGAATCTTGATTCCCCATCAGCC | | |
| | | 135 | AAGTGGGACCTTGCTGGGCATTATA | | |
| | | 136 | ATGCCCTGTGGGGGTTTCAGAGACC | | |
| | | 137 | TCTGCACAACTGCATGCACTTCTCT | | |
| | | 138 | TCGCTCCACAACCTGAAACCGAGAA | | |
| | | 139 | AGAAGGAGTTGCTGACCAGTGCCCA | | |
| | | 140 | AGCCCGGGAGGAACACAGGCAGCTC | | |
| | | 141 | CTCCACCAGGGTACCCTGTCTTGGT | | |
| | | 142 | TAGTGGAGGTGGATGTCCTTCTCTG | | |
| | | 143 | AATGCCCAATTCTTACTGTTCAGGT | | |
| IFI30 | 201422_at | 144 | TGGAGGCCTGCGTGTTGGATGAACT | tggaggcctgcgtgttggatgaacttgacatggagctagccttcctgaccatg | NM_006332.1 |
| | | | | tctggcatggcatggaagagtttgaggacatggagagaagtctgccactatgc | |
| | | | | ctgcagctctacgccccagggctgtcgccagaactatcatggagtgtgcaatg | |
| | | | | ggggaccgcggcatgcagctcatgcacgccaacgcccagcggacagatgctct | |
| | | | | ccagccaccgcacgagtatgtgccctgggtcaccgtcaatgggaaacccttgg | |
| | | | | aagatcagacccagctccttacccttgtctgccagttgtaccagggcaagaag | |
| | | | | ccggatgtctgcccttcctcaaccagctccctccggagtgtttgcttcgagtg | |
| | | | | ttggccggtgggctgcggagagctcatggaaggcgagtgggaactcggctgcc | |
| | | | | tgcctttttttctgatccagaccctcggcacctgctacttaccaactggaaaa | |
| | | | | ttttatgcatcccatgaagcccagatacacaaaattccacccctagatcaagaatcct | |
| | | | | gctccacta | |
| | | 145 | TTGACATGGAGCTAGCCTTCCTGAC | | |
| | | 146 | CAGGGCTGTCGCCAGAACTATCATG | | |
| | | 147 | TGGAGTGTGCAATGGGGGACCGCGG | | |
| | | 148 | TCCAGCCACCGCACGAGTATGTGCC | | |
| | | 149 | TGCCCTGGGTCACCGTCAATGGGAA | | |
| | | 150 | CCTTGTCTGCCAGTTGTACCAGGGC | | |
| | | 151 | GGCAAGAAGCCGGATGTCTGCCCTT | | |
| | | 152 | GGAGTGTTTGCTTCGAGTGTTGGCC | | |
| | | 153 | ATGCATCCCATGAAGCCCAGATACA | | |
| | | 154 | CTAGATCAAGAATCCTGCTCCACTA | | |
| CAT | 201432_at | 155 | TTAGCGTTCATCCGTGTAACCCGCT | ttagcgttcatccgtgtaacccgctcatcactggatgaagattctcctgtgct | NM_001752.1 |
| | | | | agatgtgcaaatgcaagctagtggcttcaaaatagagaatcccactttctata | |
| | | | | gcagattgtgtaacaattttaatgctatttccccaggggaaaatgaaggttag | |
| | | | | gatttaacagtcatttaaaaaaaaaatttgttttgacggatgattggattatt | |
| | | | | catttaaaatgattagaaggcaagtttctagctagaaatatgattttatttga | |
| | | | | caaaatttgttgaaattatgtatgtttacatatcacctcatggcctattatat | |
| | | | | taaaatatggctataaatatataaaaagaaaagataaagatgatctactcaga | |
| | | | | aatttttatttttctaaggttctcataggaaaagtacatttaatacagcagtgtcatc | |
| | | | | agaagataacttgagcaccgtcatggcttaatgtttatt | |
| | | 156 | GTAACCCGCTCATCACTGGATGAAG | | |
| | | 157 | GATGAAGATTCTCCTGTGCTAGATG | | |
| | | 158 | GATTCTCCTGTGCTAGATGTGCAAA | | |
| | | 159 | GTGCAAATGCAAGCTAGTGGCTTCA | | |
| | | 160 | GAGAATCCCACTTTCTATAGCAGAT | | |
| | | 161 | CAATTTTAATGCTATTTCCCCAGGG | | |
| | | 162 | GTATGTTTACATATCACCTCATGGC | | |
| | | 163 | TATCACCTCATGGCCTATTATATTA | | |
| | | 164 | GATAACTTGAGCACCGTCATGGCTT | | |
| | | 165 | GCACCGTCATGGCTTAATGTTTATT | | |
| G3BP | 201503_at | 166 | AAAACCCAGATAACAACCAGAGCAA | aaaacccagataacaaccagagcaaaactgttgtgccttctatttatctttga | BG500067 |
| | | | | tttcagtcttggcaattgtttaaaaaaaaaatctagatttgttttattaggtt | |
| | | | | cagagtatgtggggaattatagaatccctctttcatcactttgtgtatgtctt | |
| | | | | ttgttaacatatttgttatgccttattctaaaattgagtctcaaactggaatg | |
| | | | | cctttgaagacagatgcttctatagaggttctttgacctaaatagttcagcat | |
| | | | | ttgtatttttattctggtatctaatcagattcctaatcatagcccgtaagaag | |
| | | | | gaatgttactttaatattggactttgctcatgtgctcgtgtccgcattttttt | |
| | | | | ttttncttaaaatcatagccatatggtaaattttctattttgttatggttctctttta | |
| | | | | ttgatgggcatgcagtgggtgttacttgga | |
| | | 167 | GCAAAACTGTTGTGCCTTCTATTTA | | |
| | | 168 | TTATCTTTGATTTCAGTCTTGGCAA | | |
| | | 169 | CATATTTGTTATGCCTTATTCTAAA | | |
| | | 170 | TTGAGTCTCAAACTGGAATGCCTTT | | |
| | | 171 | GACAGATGCTTCTATAGAGGTTCTT | | |
| | | 172 | GGTTCTTTGACCTAAATAGTTCAGC | | |
| | | 173 | CAGATTCCTAATCATAGCCCGTAAG | | |
| | | 174 | TGCTCGTGTCCGCATTTTTTTTTTT | | |
| | | 175 | GGTTCTCTTTTATTGATGGGCATGC | | |
| | | 176 | GGGCATGCAGTGGGTGTTACTTGGA | | |
| ARF5 | 201526_at | 177 | GCAGTGCTGCTGGTATTTGCCAACA | gcagtgctgctggtatttgccaacaagcaggacatgcccaacgccatgcccgt | NM_001662.2 |
| | | | | gagcgagctgactgacaagctggggctacagcacttacgcagccgcacgtggt | |
| | | | | atgtccaggccacctgtgccacccaaggcacaggtctgtacgatggtctggac | |
| | | | | tggctgtcccacgagctgtcaaagcgctaaccagccaggggcaggcccctgat | |
| | | | | gcccggaagctcctgcgtgcatccccgggatgaccagactcccggactcctca | |
| | | | | ggcagtgccctttcctcccacttttcctcccccatagccacaggcctctgctc | |
| | | | | ctgctcctgcctgcatgttctctctgttgttggagcctggagccttgctctct | |
| | | | | gggcacagaggggtccactctcctgcctgctgggacctatggaaggggcttcc | |
| | | | | tggccaaggccccctcttccagaggaggagcagggatctgggtttcctttttttttt | |
| | | | | ctgttttgggtgtactctaggggccaggttggga | |
| | | 178 | TGCCCGTGAGCGAGCTGACTGACAA | | |
| | | 179 | TGCCACCCAAGGCACAGGTCTGTAC | | |
| | | 180 | GTACGATGGTCTGGACTGGCTGTCC | | |
| | | 181 | TCCCACGAGCTGTCAAAGCGCTAAC | | |
| | | 182 | CTGCGTGCATCCCCGGGATGACCAG | | |
| | | 183 | TCTCTGTTGTTGGAGCCTGGAGCCT | | |
| | | 184 | GCCTTGCTCTCTGGGCACAGAGGGG | | |
| | | 185 | GCCTGCTGGGACCTATGGAAGGGGC | | |
| | | 186 | GCCCCCTCTTCCAGAGGAGGAGCAG | | |
| | | 187 | GTGTACTCTAGGGGCCAGGTTGGGA | | |
| DUSP3 | 201536_at | 188 | GATTTAGCTCTTAGTTCTTCAAGTA | gatttagctcttagttcttcaagtaaaattaaagtctcttgtgtaagagccaa | AL048503 |
| | | | | cacatgcccagctgcggatgggagctgttcctggacagccttctactgcctgg | |
| | | | | gaagtgatggaacaggaactcagggtgcccttaccccctccccagacctgttc | |
| | | | | cctttctttgactgacagagcaccatccaggcaaaattagagcgccaaatggt | |
| | | | | tttcttctcaatcttaaagcagtatacctttccacaggctcgtctgtgtccct | |
| | | | | gccactctgagttatccagaaaccaccacctacaaatgaggggactcatctag | |
| | | | | aagacctctaaggtccccttttggctctgaggggtctctaataatccccactt | |
| | | | | ggaattcagcaccgcaaggaaattatgggtatgtgagccataatatgatggcc | |
| | | | | agcaggtngcgctgccttccacccatggtgatggatggtttggaaagggaatgttggt | |
| | | | | gccttttgtgccaca | |
| | | 189 | GAACAGGAACTCAGGGTGCCCTTAC | | |
| | | 190 | TGACTGACAGAGCACCATCCAGGCA | | |
| | | 191 | AAAGCAGTATACCTTTCCACAGGCT | | |
| | | 192 | TCCCTGCCACTCTGAGTTATCCAGA | | |
| | | 193 | GAAACCACCACCTACAAATGAGGGG | | |
| | | 194 | AGGGGACTCATCTAGAAGACCTCTA | | |
| | | 195 | CCTTTTGGCTCTGAGGGGTCTCTAA | | |
| | | 196 | GGGTCTCTAATAATCCCCACTTGGA | | |
| | | 197 | CCCACTTGGAATTCAGCACCGCAAG | | |
| | | 198 | GAATGTTGGTGCCTTTTGTGCCACA | | |
| ID2 | 201565_s_at | 199 | GAAAAACAGCCTGTCGGACCACAGC | gaaaaacagcctgtcggaccacagcctgggcatctcccggagcaaaacccctg | NM_002166.1 |
| | | | | tggacgacccgatgagcctgctatacaacatgaacgactgctactccaagctc | |
| | | | | aaggagctggtgcccagcatcccccagaacaagaaggtgagcaagatggaaat | |
| | | | | cctgcagcacctcatcgactacatcttggacctgcagatcgccctggactcgc | |
| | | | | atcccactattgtcagcctgcatcaccagagacccgggcagaaccagcgctcc | |
| | | | | aggacgccgctgaccaccctcaacacggatatcagcatcctgtccttgcaggc | |
| | | | | ttctgaattcccttctgagttaatgtcaaatgacagcaaagcactgtgtggct | |
| | | | | gaataagcggtgttcatgatttcttttattctttgcacaacaacaacaacaacaaattc | |
| | | | | acggaatcttttaagtgctgaac | |
| | | 200 | GACCCGATGAGCCTGCTATACAACA | | |
| | | 201 | CCCGATGAGCCTGCTATACAACATG | | |
| | | 202 | GAGCCTGCTATACAACATGAACGAC | | |
| | | 203 | TATACAACATGAACGACTGCTACTC | | |
| | | 204 | GTGTGGCTGAATAAGCGGTGTTCAT | | |
| | | 205 | GAATAAGCGGTGTTCATGATTTCTT | | |
| | | 206 | AGCGGTGTTCATGATTTCTTTTATT | | |
| | | 207 | GGTGTTCATGATTTCTTTTATTCTT | | |
| | | 208 | CAACAACAAATTCACGGAATCTTTT | | |
| | | 209 | TCACGGAATCTTTTAAGTGCTGAAC | | |
| DNMT1 | 201697_s_at | 210 | ACCCAGAGCAGCACCGTGTGGTGAG | acccagagcagcaccgtgtggtgagcgtgcgggagtgtgcccgctcccagggc | NM_001379.1 |
| | | | | ttccctgacacctaccggctcttcggcaacatcctggacaagcaccggcaggt | |
| | | | | gggcaatgccgtgccaccgcccctggccaaagccattggcttggagatcaagc | |
| | | | | tttgtatgttggccaaagcccgagagagtgcctcagctaaaataaaggaggag | |
| | | | | gaagctgctaaggactagttctgccctcccgtcacccctgtttctggcaccag | |
| | | | | gaatccccaacatgcactgatgttgtgtttttaacatgtcaatctgtccgttc | |
| | | | | acatgtgtggtacatggtgtttgtggccttggctgacatgaagctgttgtgtg | |
| | | | | aggttcgcttatcaactaatgatttagtgatcaaattgtgcagtactttgtgc | |
| | | | | attctggattttaaaagttttttattatgcattatatcaaatctaccactgtatgagt | |
| | | 211 | ACATCCTGGACAAGCACCGGCAGGT | | |
| | | 212 | CGGCAGGTGGGCAATGCCGTGCCAC | | |
| | | 213 | CCCCTGGCCAAAGCCATTGGCTTGG | | |
| | | 214 | GAGATCAAGCTTTGTATGTTGGCCA | | |
| | | 215 | AGCTGCTAAGGACTAGTTCTGCCCT | | |
| | | 216 | CAATCTGTCCGTTCACATGTGTGGT | | |
| | | 217 | GGCTGACATGAAGCTGTTGTGTGAG | | |
| | | 218 | GTGTGAGGTTCGCTTATCAACTAAT | | |
| | | 219 | GCAGTACTTTGTGCATTCTGGATTT | | |
| | | 220 | ATATCAAATCTACCACTGTATGAGT | | |
| CCND3 | 201700_at | 221 | TTGCATTTGGATTGGGGTCCCTCTA | ttgcatttggattggggtccctctaaaatttaatgcatgatagacacatatga | NM_001760.1 |
| | | | | gggggaatagtctagatggctcctctcagtactttggaggcccctatgtagtc | |
| | | | | cgtgctgacagctgctcctagagggaggggcctaggcctcagccagagaagct | |
| | | | | ataaattcctctttgctttgctttctgctcagcttctcctgtgtgattgacag | |
| | | | | ctttgctgctgaaggctcattttaatttattaattgctttgagcacaacttta | |
| | | | | agaggacataatgggggcctggccatccacaagtggtggtaaccctggtggtt | |
| | | | | gctgttttcctcccttctgctactggcaaaaggatctttgtggccaaggagct | |
| | | | | gctatagcctggggtggggtcatgccctcctctcccattgtccctctgcccca | |
| | | | | tcctccagcagggaaaatgcagcagggatgccctggaggtggctgagcccctg | |
| | | | | tctagagagggaggcaagccctgttgacacaggtctttcctaaggctgcaaggtttag | |
| | | | | gctggtggccc | |
| | | 222 | GGGAATAGTCTAGATGGCTCCTCTC | | |
| | | 223 | GGCTCCTCTCAGTACTTTGGAGGCC | | |
| | | 224 | CTATGTAGTCCGTGCTGACAGCTGC | | |
| | | 225 | GCTCAGCTTCTCCTGTGTGATTGAC | | |
| | | 226 | GCTTTGCTGCTGAAGGCTCATTTTA | | |
| | | 227 | TAACCCTGGTGGTTGCTGTTTTCCT | | |
| | | 228 | TGGCCAAGGAGCTGCTATAGCCTGG | | |
| | | 229 | GGCTGAGCCCCTGTCTAGAGAGGGA | | |
| | | 230 | GACACAGGTCTTTCCTAAGGCTGCA | | |
| | | 231 | GCTGCAAGGTTTAGGCTGGTGGCCC | | |
| CD14 | 201743_at | 232 | GTGCCTAAAGGACTGCCAGCCAAGC | ccatccagaatctagcgctgcgcaacacaggaatggagacgcccacaggcgtg | NM_000591.1 |
| | | | | tgcgccgcactggcggcggcaggtgtgcagccccacagcctagacctcagcca | |
| | | | | caactcgctgcgcgccaccgtaaaccctagcgctccgagatgcatgtggtcca | |
| | | | | gcgccctgaactccctcaatctgtcgttcgctgggctggaacaggtgcctaaa | |
| | | | | ggactgccagccaagctcagagtgctcgatctcagctgcaacagactgaacag | |
| | | | | ggcgccgcagcctgacgagctgcccgaggtggataacctgacactggacggga | |
| | | | | atcccttcctggtccctggaactgccctcccccacgagggctcaatgaactcc | |
| | | | | ggcgtggtcccagcctgtgcacgttcgaccctgtcggtgggggtgtcgggaac | |
| | | | | cctggtgctgctccaaggggcccggggctttgcctaagatccaagacagaata | |
| | | | | atgaatggactcaaactgccttggcttcaggggagtcccgtcaggacgttgaggact | |
| | | | | tttcgaccaattcaacc | |
| | | 233 | GCCAAGCTCAGAGTGCTCGATCTCA | | |
| | | 234 | GCAACAGACTGAACAGGGCGCCGCA | | |
| | | 235 | TGACGAGCTGCCCGAGGTGGATAAC | | |
| | | 236 | CTGACACTGGACGGGAATCCCTTCC | | |
| | | 237 | ACGAGGGCTCAATGAACTCCGGCGT | | |
| | | 238 | CCCGGGGCTTTGCCTAAGATCCAAG | | |
| | | 239 | GGGAGTCCCGTCAGGACGTTGAGGA | | |
| | | 240 | TGAGGACTTTTCGACCAATTCAACC | | |
| | | 241 | CCATCCAGAATCTAGCGCTGCGCAA | | |
| | | 242 | CCCTAGCGCTCCGAGATGCATGTGG | | |
| RPA2 | 201756_at | 243 | GGTTTCATCTATCAAATGTCTCCTC | gatattttacagctggacctagtttcacaatctgttgtctccagctctgcata | NM_002946.1 |
| | | | | tgtctggccagggggcttctaggaagtaggtttcatctatcaaatgtctcctc | |
| | | | | tgacttccttttgaaacttactgctcttctgttttattttgttttgtttgaag | |
| | | | | ctcagagggagatgggcaattgacagggatgcaatccagggtgggatttcttg | |
| | | | | aggaagttacaaataagcttgttacaacatcaagatagatggaattggaagga | |
| | | | | tgctaccaggagagtacttacatagtgctcaggagtttctcttcttaaaatgt | |
| | | | | ttactgctgaaagatgagcaggaccagggcgttataggcagagccctagccag | |
| | | | | aaacctgctggcctctgcctgttttcatttcccactttggttgtgtggcatta | |
| | | | | ctttcagaattgcactttcctgcttgtcatgactttttgacacacttgccatgac | |
| | | 244 | TCCTCTGACTTCCTTTTGAAACTTA | | |
| | | 245 | ACTTACTGCTCTTCTGTTTTATTTT | | |
| | | 246 | GACAGGGATGCAATCCAGGGTGGGA | | |
| | | 247 | TAGCCAGAAACCTGCTGGCCTCTGC | | |
| | | 248 | TGTTTTCATTTCCCACTTTGGTTGT | | |
| | | 249 | ACTTTCCTGCTTGTCATGACTTTTT | | |
| | | 250 | GACTTTTTGACACACTTGCCATGAC | | |
| | | 251 | GATATTTTACAGCTGGACCTAGTTT | | |
| | | 252 | GCTGGACCTAGTTTCACAATCTGTT | | |
| | | 253 | CTCCAGCTCTGCATATGTCTGGCCA | | |
| CDC25B | 201853_s_at | 254 | GCTTGGTCTGTTTGACTTTACGCCC | gcttggtctgtttgactttacgcccatctcaggacacttccgtagactgttta | NM_021873.1 |
| | | | | ggttcccctgtcaaatatcagttacccactcggtcccagttttgttgccccag | |
| | | | | aaagggatgttattatccttgggggctcccagggcaagggttaaggcctgaat | |
| | | | | catgagcctgctggaagcccagcccctactgctgtgaaccctggggcctgact | |
| | | | | gctcagaacttgctgctgtcttgttgcggatggatggaaggttggatggatgg | |
| | | | | gtggatggccgtggatggccgtggatgcgcagtgccttgcatacccaaaccag | |
| | | | | gtgggagcgttttgttgagcatgacacctgcagcaggaatatatgtgtgccta | |
| | | | | tttgtgtggacaaaaatatttacacttagggtttggagctattcaagaggaaa | |
| | | | | tgtcacagaagcagctaaaccaaggactgagcaccctctggattctgaatctc | |
| | | | | aagatgggggcagggctgtgcttgaaggccctgctgagtcatctgttagggccttgg | |
| | | | | ttc | |
| | | 255 | CCATCTCAGGACACTTCCGTAGACT | | |
| | | 256 | GTTTAGGTTCCCCTGTCAAATATCA | | |
| | | 257 | CAAATATCAGTTACCCACTCGGTCC | | |
| | | 258 | TGAATCATGAGCCTGCTGGAAGCCC | | |
| | | 259 | CCCCTACTGCTGTGAACCCTGGGGC | | |
| | | 260 | TTGCTGCTGTCTTGTTGCGGATGGA | | |
| | | 261 | GATGGCCGTGGATGGCCGTGGATGC | | |
| | | 262 | GTGGGAGCGTTTTGTTGAGCATGAC | | |
| | | 263 | GCACCCTCTGGATTCTGAATCTCAA | | |
| | | 264 | GAGTCATCTGTTAGGGCCTTGGTTC | | |
| ST6GAL1 | 201998_at | 265 | GGCTGCTTAACTGCTGTATAGGACA | ggctgcttaactgctgtataggacaagccccttacccctctctgggcccatga | AI743792 |
| | | | | attcctggcttggtttatgttctgatttgacacactgattttaatcttcgaat | |
| | | | | catgacactgagtgcagaggaggtggcattccgacagcaggacatacatgttg | |
| | | | | gtgtgaagactgggacgacactgggtagaatctagtttttaattattattaat | |
| | | | | ataaaggatcaaattaatttaaatatgattctgaagtctacagaacttttagt | |
| | | | | tctgtgctgtctatgtggacactttggtaaaatgcaaattatgatatggacgt | |
| | | | | tatcattggtctggtgagatgtttcatatttgtgacagttaatttaaaaatta | |
| | | | | tganttaatgctgcctgtgtctatggggttctgtcttctttgatagccatctattcat | |
| | | | | ctggatcatgggaccctctctaa | |
| | | 266 | TGCTGTATAGGACAAGCCCCTTACC | | |
| | | 267 | GCCCATGAATTCCTGGCTTGGTTTA | | |
| | | 268 | GGCTTGGTTTATGTTCTGATTTGAC | | |
| | | 269 | GGTGGCATTCCGACAGCAGGACATA | | |
| | | 270 | GAAGACTGGGACGACACTGGGTAGA | | |
| | | 271 | AGTTCTGTGCTGTCTATGTGGACAC | | |
| | | 272 | AATGCTGCCTGTGTCTATGGGGTTC | | |
| | | 273 | TATGGGGTTCTGTCTTCTTTGATAG | | |
| | | 274 | GATAGCCATCTATTCATCTGGATCA | | |
| | | 275 | ATCTGGATCATGGGACCCTCTCTAA | | |
| ARL2BP | 202092_s_at | 276 | GGGCCACAGTTTCAGTACTTCAGCC | ccctcctggacctatttatcctgaaacaccttcttgtattcattaaccatagt | NM_012106.1 |
| | | | | actcctccccacctcaagtagacacctctctcaggagcttctgagtcagacgc | |
| | | | | ctctggagcgagccctatgtcaggcactccacctggggggcccttccccagca | |
| | | | | tacctgctggtgtgtaagtgtggactaacccgccgccaccaccctctgttcca | |
| | | | | gcaggctctgcatgaatctttgtgcacttgcacctctttttcacatgggccac | |
| | | | | agtttcagtacttcagcctcagtggggttcctgatgtttatctagggtgttac | |
| | | | | tcaagcccagtttgagattttggagtctcctgtgatcacatcttgtctcggct | |
| | | | | gtaggaatcaacagaaggagacgtcctctacataaaagctccatgtgaaaagc | |
| | | | | tactcctagtcttaacatttgcagtccttgtgtcactgtcttctggtcctgatgtag | |
| | | | | tccc | |
| | | 277 | CTTCAGCCTCAGTGGGGTTCCTGAT | | |
| | | 278 | TTTGGAGTCTCCTGTGATCACATCT | | |
| | | 279 | TCACATCTTGTCTCGGCTGTAGGAA | | |
| | | 280 | GACGTCCTCTACATAAAAGCTCCAT | | |
| | | 281 | GCTACTCCTAGTCTTAACATTTGCA | | |
| | | 282 | TGTCTTCTGGTCCTGATGTAGTCCC | | |
| | | 283 | CCCTCCTGGACCTATTTATCCTGAA | | |
| | | 284 | ATTCATTAACCATAGTACTCCTCCC | | |
| | | 285 | GACACCTCTCTCAGGAGCTTCTGAG | | |
| | | 286 | CTCTGGAGCGAGCCCTATGTCAGGC | | |
| TSPO | 202096_s_at | 287 | GGCTCCTACCTGGTCTGGAAAGAGC | ggctcctacctggtctggaaagagctgggaggcttcacagagaaggctgtggt | NM_000714.2 |
| | | | | tcccctgggcctctacactgggcagctggccctgaactgggcatggcccccca | |
| | | | | tcttctttggtgcccgacaaatgggctgggccttggtggatctcctgctggtc | |
| | | | | agtggggcggcggcngccactaccgtggcctggtaccaggtgagcccgctggc | |
| | | | | cgcccgcctgctctacccctacctggcctggctggccttcgcgaccacactca | |
| | | | | actactgcgtatggcgggacaaccatggctggcatgggggacggcggctgcca | |
| | | | | gagtgagtgcccggcccaccagggactgcagctgcaccagcaggtgccatcac | |
| | | | | gcttgtgatgtggtggccgtcacgctttcatgaccactgggcctgctagtctg | |
| | | | | tcagggccttggcccaggggtcagcagagcttcagaggttgccccacctgagc | |
| | | | | ccccacccgggagcagtgtcctgtgctttctgcatgcttagagcatg | |
| | | 288 | GGAAAGAGCTGGGAGGCTTCACAGA | | |
| | | 289 | CATCTTCTTTGGTGCCCGACAAATG | | |
| | | 290 | CCGACAAATGGGCTGGGCCTTGGTG | | |
| | | 291 | CGTGGCCTGGTACCAGGTGAGCCCG | | |
| | | 292 | GACCACACTCAACTACTGCGTATGG | | |
| | | 293 | AACTACTGCGTATGGCGGGACAACC | | |
| | | 294 | ATGGCGGGACAACCATGGCTGGCAT | | |
| | | 295 | TGCACCAGCAGGTGCCATCACGCTT | | |
| | | 296 | TCACGCTTGTGATGTGGTGGCCGTC | | |
| | | 297 | GTGCTTTCTGCATGCTTAGAGCATG | | |
| ZMYND11 | 202136_at | 298 | AGGTTTGTCAGGGTCACTCTAAAGA | aggtttgtcagggtcactctaaagataaaaatgtaactaagtcttctgtgaaa | BE250417 |
| | | | | tatcatccatctaatcttgatgctgttgcagatggtggtgacacaagttaatt | |
| | | | | gacaaactactgccaaatggtgcacaatattttgtaaaaagtacccagtagcc | |
| | | | | ccatttcatacaatgtacctaaattatgcagtaacttggcatcatcgttccct | |
| | | | | ccttgttgctgtgtaattagtcagtgttgccacagtgtgtggcgctgatggag | |
| | | | | atgtcagaaccgagaacacttaaccttctttgattgtttttcaagttttaaga | |
| | | | | cttcgatccacccctatgagagcaagtaattgtggaaatatttttggtgtaaa | |
| | | | | atcattccagagtatgtaatatttaactgatagctgcatgaaagtgagattcg | |
| | | | | tgttactttggcttttctgtctctgttgacacggttgcacatttccaagtta | |
| | | 299 | GTGAAATATCATCCATCTAATCTTG | | |
| | | 300 | TGTAAAAAGTACCCAGTAGCCCCAT | | |
| | | 301 | GTAGCCCCATTTCATACAATGTACC | | |
| | | 302 | GCAGTAACTTGGCATCATCGTTCCC | | |
| | | 303 | AGTGTGTGGCGCTGATGGAGATGTC | | |
| | | 304 | GTCAGAACCGAGAACACTTAACCTT | | |
| | | 305 | GATCCACCCCTATGAGAGCAAGTAA | | |
| | | 306 | GAGATTCGTGTTACTTTGGCTTTTC | | |
| | | 307 | GCTTTTCTGTCTCTGTTGACACGGT | | |
| | | 308 | GACACGGTTGCACATTTCCAAGTTA | | |
| BLMH | 202179_at | 309 | GCATGTCCCTGAAGAGGTGCTAGCT | gcatgtccctgaagaggtgctagctgtgttagagcaggaacccattatcctgc | NM_000386.1 |
| | | | | cagcatgggaccccatgggagctttggctgagtgatactgccctccagctctt | |
| | | | | tcctccttccatggaacctgacgtagctgcaaaggacagatccagggactgaa | |
| | | | | gccaaagttatgcaagggactgtgtgttgccacaggacacagtcagatttcca | |
| | | | | gtctccaccaggaacctcttcagaaagtgtgctttatgctgaaacagaatact | |
| | | | | gttaaaggaaaaaaaagaggggggaagatcaggtcatactatctactctcctc | |
| | | | | atctctaacagctcaggatctcttagcattttaattagatgtaattgtttgtc | |
| | | | | tttaactgtcaaaaagtttggttctgtgtctgtgttttaataagacgagagga | |
| | | | | cgagcgattgaggtgtatggagagaaaacagacctaatgctccttgttcctag | |
| | | | | agtagagtggagggagggtggcctaagagttgagctctcggaactgcatgctgc | |
| | | 310 | GAACCCATTATCCTGCCAGCATGGG | | |
| | | 311 | ACCCCATGGGAGCTTTGGCTGAGTG | | |
| | | 312 | TTTGGCTGAGTGATACTGCCCTCCA | | |
| | | 313 | TCCTCCTTCCATGGAACCTGACGTA | | |
| | | 314 | AGGAACCTCTTCAGAAAGTGTGCTT | | |
| | | 315 | TCTCCTCATCTCTAACAGCTCAGGA | | |
| | | 316 | AACAGCTCAGGATCTCTTAGCATTT | | |
| | | 317 | AAACAGACCTAATGCTCCTTGTTCC | | |
| | | 318 | GAGGGTGGCCTAAGAGTTGAGCTCT | | |
| | | 319 | TTGAGCTCTCGGAACTGCATGCTGC | | |
| CTSH | 202295_s_at | 320 | AGCCGCAGCGCAGACTGGCGGAGAA | tagaacgggcatctactccagtacttcctgccataaaactccagataaagtaa | NM_004390.1 |
| | | | | accatgcagtactggctgttgggtatggagaaaaaaatgggatcccttactgg | |
| | | | | atcgtgaaaaactcttggggtccccagtggggaatgaacgggtacttcctcat | |
| | | | | cgagcgcggaaagaacatgtgtggcctggctgcctgcgcctcctaccccatcc | |
| | | | | ctctggtgtgagccgtggcagccgcagcgcagactggcggagaaggagaggaa | |
| | | | | cgggcagcctgggcctgggtggaaatcctgccctggaggaagttgtggggaga | |
| | | | | tccactgggacccccaacattctgccctcacctctgtgcccagcctggaaacc | |
| | | | | tacagacaaggaggagttccaccatgagctcacccgtgtctatgacgcaaaga | |
| | | | | tcaccagccatgtgccttagtgtccttcttaacagactcaaaccacatggacc | |
| | | | | acgaatattctttctgtccagaagggctactttccacatatagagctccagggactgt | |
| | | | | ctttt | |
| | | 321 | TGTGGGGAGATCCACTGGGACCCCC | | |
| | | 322 | AAGGAGGAGTTCCACCATGAGCTCA | | |
| | | 323 | CTCACCCGTGTCTATGACGCAAAGA | | |
| | | 324 | AAAGATCACCAGCCATGTGCCTTAG | | |
| | | 325 | GCCTTAGTGTCCTTCTTAACAGACT | | |
| | | 326 | GGACCACGAATATTCTTTCTGTCCA | | |
| | | 327 | TGTCCAGAAGGGCTACTTTCCACAT | | |
| | | 328 | TATAGAGCTCCAGGGACTGTCTTTT | | |
| | | 329 | TAGAACGGGCATCTACTCCAGTACT | | |
| | | 330 | CAGTACTTCCTGCCATAAAACTCCA | | |
| MAPRE2 | 202501_at | 331 | CAGCCACAAAACTGTCATTCACTCT | cagccacaaaactgtcattcactctaggggacccctactaaagggtaacttca | NM_014268.1 |
| | | | | ggtgtgcagccctgagctccaaggctctgcaccatgccacacacttgctgtaa | |
| | | | | ggctagaagtgaagaccttattaataggagcataattgcgagggagaatcatg | |
| | | | | gttctgcagtctggtgtagacactggaataacagcacagaaaaatctatgact | |
| | | | | cccaatatcttctagaataaagaattttccctctttaacacaagggccctcct | |
| | | | | tgtcattgaccttagctaaaccatggcaattcataaatagaggaaacattaat | |
| | | | | gaattaaaagcattccttattttttaactaatatttgtacattttcttagtct | |
| | | | | ctttccaagtctttgcctcttttttttctttatttttattttttcctttgacagatg | |
| | | | | gtatcccttcctggatcattcatttcaccttggtt | |
| | | 332 | TCATTCACTCTAGGGGACCCCTACT | | |
| | | 333 | ACTTCAGGTGTGCAGCCCTGAGCTC | | |
| | | 334 | CATGCCACACACTTGCTGTAAGGCT | | |
| | | 335 | GAATCATGGTTCTGCAGTCTGGTGT | | |
| | | 336 | AATCTATGACTCCCAATATCTTCTA | | |
| | | 337 | AACACAAGGGCCCTCCTTGTCATTG | | |
| | | 338 | CCCTCCTTGTCATTGACCTTAGCTA | | |
| | | 339 | GACCTTAGCTAAACCATGGCAATTC | | |
| | | 340 | TTGACAGATGGTATCCCTTCCTGGA | | |
| | | 341 | CTGGATCATTCATTTCACCTTGGTT | | |
| ARHGEF7 | 202548_s_at | 342 | GTTACGGCATTGCCTTTTCTTTCTG | gttacggcattgccttttctttctgtggatccagtatcttcctcggcttttta | NM_003899.1 |
| | | | | gggagcaggaaaaatgcgtctgagagcaactctttttaaaaacctgccctgtt | |
| | | | | gtatataactgtgtctgtttcaccgtgtgacctcccaagggggtgggaacttg | |
| | | | | atataaacgtttaaaggggccacgatttgcccgagggttactcctttgctctc | |
| | | | | accttgtatggatgaggagatgaagccatttcttatcctgtagatgtgaagca | |
| | | | | ctttcagttttcagcgatgttggaatgtagcatcagaagctcgttccttcaca | |
| | | | | ctcagtggcgtctgtgcttgtccacatgcactgggcgtctgggaccttgaatg | |
| | | | | cctgccctggttgtgtggactccttaatgccaatcatttcttcacttctctgggaca | |
| | | | | cccagggcgcctgttgacaagtg | |
| | | 343 | TTCTGTGGATCCAGTATCTTCCTCG | | |
| | | 344 | ATCTTCCTCGGCTTTTTAGGGAGCA | | |
| | | 345 | AAACCTGCCCTGTTGTATATAACTG | | |
| | | 346 | AACTGTGTCTGTTTCACCGTGTGAC | | |
| | | 347 | GCCACGATTTGCCCGAGGGTTACTC | | |
| | | 348 | CCTTTGCTCTCACCTTGTATGGATG | | |
| | | 349 | GATGAAGCCATTTCTTATCCTGTAG | | |
| | | 350 | GTAGCATCAGAAGCTCGTTCCTTCA | | |
| | | 351 | CACACTCAGTGGCGTCTGTGCTTGT | | |
| | | 352 | CACCCAGGGCGCCTGTTGACAAGTG | | |
| KIFAP3 | 203333_at | 353 | CCACCAAGCCACAAGAGACGTCATA | ccaccaagccacaagagacgtcataatcaaggaaacacaggctccagcatatc | NM_014970.1 |
| | | | | tcatagacctaatgcatgataagaataatgaaatccgaaaggtctgtgataat | |
| | | | | acattagatattatagcggaatatgatgaagaatgggctaagaaaattcagag | |
| | | | | tgaaaagtttcgctggcataactctcagtggctggagatggtagagagtcgtc | |
| | | | | agatggatgagagtgagcagtacttgtatggtgatgatcgaattgagccatac | |
| | | | | attcatgaaggagatattctcgaaagacctgaccttttctacaactcagatgg | |
| | | | | attaattgcctctgaaggagccataagtcccgatttcttcaatgattaccacc | |
| | | | | ttcaaaatggagatgttgttgggcagcattcatttcctggcagccttggaatg | |
| | | | | gatggctttggccaaccagttggcattcttggacgccctgccacagcatatgg | |
| | | | | attccgccctgatgaaccttactactatggctatggatcttgataaagtatctgtttc | |
| | | | | catgtgtaatctca | |
| | | 354 | AACACAGGCTCCAGCATATCTCATA | | |
| | | 355 | GTTTCGCTGGCATAACTCTCAGTGG | | |
| | | 356 | CTCGAAAGACCTGACCTTTTCTACA | | |
| | | 357 | GGAGCCATAAGTCCCGATTTCTTCA | | |
| | | 358 | GATTTCTTCAATGATTACCACCTTC | | |
| | | 359 | GGATGGCTTTGGCCAACCAGTTGGC | | |
| | | 360 | CCCTGCCACAGCATATGGATTCCGC | | |
| | | 361 | GCATATGGATTCCGCCCTGATGAAC | | |
| | | 362 | GAACCTTACTACTATGGCTATGGAT | | |
| | | 363 | GTATCTGTTTCCATGTGTAATCTCA | | |
| OFD1 | 203569_s_at | 364 | AGCAGGAGCAAGACCAGGAGTCGGC | agcaggagcaagaccaggagtcggcagataagagctcaaaaaagatggtccaa | NM_003611.1 |
| | | | | gaaggctccctagtggacacgctgcaatctagtgacaaagtcgaaagtttaac | |
| | | | | aggcttttctcatgaagaactagacgactcttggtaaccatgtttgctgccca | |
| | | | | gcttctaacttacataccgtgagaagttacgtaacatttactcctttgtaaat | |
| | | | | gtttccctatcatcagacaaaactcaataaaaatgtgtgtaatccaatgtggg | |
| | | | | tttttttttccataattaattttgataccatagtgtgtgaaccaagaataatctagtc | |
| | | | | acgtgaaacctcttctccagtcatagtatt | |
| | | 365 | CAAGAAGGCTCCCTAGTGGACACGC | | |
| | | 366 | GTGGACACGCTGCAATCTAGTGACA | | |
| | | 367 | AAGTTTAACAGGCTTTTCTCATGAA | | |
| | | 368 | GAACTAGACGACTCTTGGTAACCAT | | |
| | | 369 | CTTGGTAACCATGTTTGCTGCCCAG | | |
| | | 370 | TGTTTGCTGCCCAGCTTCTAACTTA | | |
| | | 371 | CCAGCTTCTAACTTACATACCGTGA | | |
| | | 372 | AAATGTTTCCCTATCATCAGACAAA | | |
| | | 373 | GATACCATAGTGTGTGAACCAAGAA | | |
| | | 374 | AAACCTCTTCTCCAGTCATAGTATT | | |
| CEBPA | 204039_at | 375 | AAGCTAGGTCGTGGGTCAGCTCTGA | aagctaggtcgtgggtcagctctgaggatgtatacccctggtgggagagggag | NM_004364.1 |
| | | | | acctagagatctggctgtggggcgggcatggggggtgaagggccactgggacc | |
| | | | | ctcagccttgtttgtactgtatgccttcagcattgcctaggaacacgaagcac | |
| | | | | gatcagtccatccagagggaccggagttatgacaagcttcccaaatattttgc | |
| | | | | tttatcagccgatatcaacacttgtatctggcctctgtgcccagcagtgcctt | |
| | | | | gtgcaatgtgaatgtaccgtctctgctaaaccaccattttatttggttttgtt | |
| | | | | ttgtttggttttctcggatacttgccaaaatgagactctccgtcggcagctgg | |
| | | | | gggaagggtctgagactctctttccttttggttttgggattacttttgatcct | |
| | | | | gggggaccaatgaggtgaggggggttctcctttgccctcagctttcccagccc | |
| | | | | tccggcctgggctgcccacaaggcttctcccccagaggccctggctcctggtcgggaa | |
| | | | | gggag | |
| | | 376 | AGCTCTGAGGATGTATACCCCTGGT | | |
| | | 377 | GAGGGAGACCTAGAGATCTGGCTGT | | |
| | | 378 | AGCCTTGTTTGTACTGTATGCCTTC | | |
| | | 379 | ATGCCTTCAGCATTGCCTAGGAACA | | |
| | | 380 | GAACACGAAGCACGATCAGTCCATC | | |
| | | 381 | TCAACACTTGTATCTGGCCTCTGTG | | |
| | | 382 | TGTGAATGTACCGTCTCTGCTAAAC | | |
| | | 383 | TGTTTGGTTTTCTCGGATACTTGCC | | |
| | | 384 | GCCAAAATGAGACTCTCCGTCGGCA | | |
| | | 385 | CCCTGGCTCCTGGTCGGGAAGGGAG | | |
| CCL4 | 204103_at | 386 | TACCATGAAGCTCTGCGTGACTGTC | taccatgaagctctgcgtgactgtcctgtctctcctcatgctagtagctgcct | NM_002984.1 |
| | | | | tctgctctccagcgctctcagcaccaatgggctcagaccctcccaccgcctgc | |
| | | | | tgcttttcttacaccgcgaggaagcttcctcgcaactttgtggtagattacta | |
| | | | | tgagaccagcagcctctgctcccagccagctgtggtattccaaaccaaaagaa | |
| | | | | gcaagcaagtctgtgctgatcccagtgaatcctgggtccaggagtacgtgtat | |
| | | | | gacctggaactgaactgagctgctcagagacaggaagtcttcagggaaggtca | |
| | | | | cctgagcccggatgcttctccatgagacacatctcctccatactcaggactcc | |
| | | | | tctccgcagttcctgtcccttctcttaatttaatcttttttatgtgccgtgtt | |
| | | | | attgtattaggtgtcatttccattatttatattagtttagccaaaggataagtgtcc | |
| | | | | tatggggatggtccactgtcactg | |
| | | 387 | CTCATGCTAGTAGCTGCCTTCTGCT | | |
| | | 388 | GCTCTCAGCACCAATGGGCTCAGAC | | |
| | | 389 | TTTCTTACACCGCGAGGAAGCTTCC | | |
| | | 390 | GCTTCCTCGCAACTTTGTGGTAGAT | | |
| | | 391 | AGTCTGTGCTGATCCCAGTGAATCC | | |
| | | 392 | GACCTGGAACTGAACTGAGCTGCTC | | |
| | | 393 | TCAGGGAAGGTCACCTGAGCCCGGA | | |
| | | 394 | TCCATGAGACACATCTCCTCCATAC | | |
| | | 395 | ATCTTTTTTATGTGCCGTGTTATTG | | |
| | | 396 | CTATGGGGATGGTCCACTGTCACTG | | |
| STAB1 | 204150_at | 397 | GTGACGCAGGCCCTGACAACAGTTC | gtgacgcaggccctgacaacagttcctgggcccctgtggccccagggacagtt | NM_015136.1 |
| | | | | gtggttagccgtatcattgtgtgggacatcatggccttcaatggcatcatcca | |
| | | | | tgctctggccagccccctcctggcacccccacagccccaggcagtgctggcgc | |
| | | | | ctgaagccccacctgtggcggcaggcgtgggggctgtgcttgccgctggagca | |
| | | | | ctgcttggcttggtggccggagctctctacctccgtgcccgaggcaagcccac | |
| | | | | gggctttggcttctctgccttccaggcggaagatgatgctgacgacgacttct | |
| | | | | caccgtggcaagaagggaccaaccccaccctggtctctgtccccaaccctgtc | |
| | | | | tttggcagcgacaccttttgtgaacccttcgatgactcactgctggaggagga | |
| | | | | cttccctgacacccagaggatcctcacagtcaagtgacgaggctggggctgaa | |
| | | | | agcagaagcatgcacagggaggagaccacttttattgcttgtctgggtggat | |
| | | 398 | GCCCCAGGGACAGTTGTGGTTAGCC | | |
| | | 399 | GGTTAGCCGTATCATTGTGTGGGAC | | |
| | | 400 | TGTGTGGGACATCATGGCCTTCAAT | | |
| | | 401 | TCAATGGCATCATCCATGCTCTGGC | | |
| | | 402 | CGAGGCAAGCCCACGGGCTTTGGCT | | |
| | | 403 | AGATGATGCTGACGACGACTTCTCA | | |
| | | 404 | TGGCAGCGACACCTTTTGTGAACCC | | |
| | | 405 | CACTGCTGGAGGAGGACTTCCCTGA | | |
| | | 406 | CCTGACACCCAGAGGATCCTCACAG | | |
| | | 407 | ACTTTTATTGCTTGTCTGGGTGGAT | | |
| RUNX3 | 204197_s_at | 408 | ATCCATTGTCCTTGTAGTTTCTTCC | atccattgtccttgtagtttcttccctcctgttctctggttatagctggtccc | NM_004350.1 |
| | | | | aggtcagcgtgggaggcacctttgggttcccagtgcccagcactttgtagtct | |
| | | | | catcccagattactaacccttcctgatcctggagaggcagggatagtaaataa | |
| | | | | attgctcttcctaccccatcccccatcccctgacaaaaagtgacggcagccgt | |
| | | | | actgagtctgtaaggcccaaagtgggtacagacagcctgggctggtaaaagta | |
| | | | | ggtccttatttacaaggctgcgttaaagttgtactaggcaaacacactgatgt | |
| | | | | aggaagcacgaggaaaggaagacgttttgatatagtgttactgtgagcctgtc | |
| | | | | agtagtgggtaccaatcttttgtgacatattgtcatgctgaggtgtgacacct | |
| | | | | gctgcactcatctgatgtaaaaccatcccagagctggcgagaggatggagctgggtg | |
| | | | | gaaactgctttgcactatcgtttgctt | |
| | | 409 | CTGTTCTCTGGTTATAGCTGGTCCC | | |
| | | 410 | GGTCCCAGGTCAGCGTGGGAGGCAC | | |
| | | 411 | CACTTTGTAGTCTCATCCCAGATTA | | |
| | | 412 | ATCCCAGATTACTAACCCTTCCTGA | | |
| | | 413 | CAGCCGTACTGAGTCTGTAAGGCCC | | |
| | | 414 | AAGTGGGTACAGACAGCCTGGGCTG | | |
| | | 415 | TGAGCCTGTCAGTAGTGGGTACCAA | | |
| | | 416 | ACCTGCTGCACTCATCTGATGTAAA | | |
| | | 417 | TGTAAAACCATCCCAGAGCTGGCGA | | |
| | | 418 | AACTGCTTTGCACTATCGTTTGCTT | | |
| IFI6 | 204415_at | 419 | TGACCTTCATGGCCGTCGGAGGAGG | tgaccttcatggccgtcggaggaggactcgcagtcgccgggctgcccgcgctg | NM_022873.1 |
| | | | | ggcttcaccggcgccggcatcgcggccaactcggtggctgcctcgctgatgag | |
| | | | | ctggtctgcgatcctgaatgggggcggcgtgcccgccggggggctagtggcca | |
| | | | | cgctgcagagcctcggggctggtggcagcagcgtcgtcataggtaatattggt | |
| | | | | gccctgatgggctacgccacccacaagtatctcgatagtgaggaggatgagga | |
| | | | | gtagccagcagctcccagaacctcttcttccttcttggcctaactcttccagt | |
| | | | | taggatctagaactttgcctttttttttttttttttttttttttgagatgggt | |
| | | | | tctcactatattgtccaggctagagtgcagtggctattcacagatgcgaacat | |
| | | | | agtacactgcagcctccaactcctagcctcaagtgatcctcctgtctcaacct | |
| | | | | cccaagtaggattacaagcatgcgccgacgatgcccagaatccagaacttt | |
| | | 420 | TGGCAGCAGCGTCGTCATAGGTAAT | | |
| | | 421 | GTCGTCATAGGTAATATTGGTGCCC | | |
| | | 422 | ATTGGTGCCCTGATGGGCTACGCCA | | |
| | | 423 | GCCACCCACAAGTATCTCGATAGTG | | |
| | | 424 | GGATGAGGAGTAGCCAGCAGCTCCC | | |
| | | 425 | TTCTTGGCCTAACTCTTCCAGTTAG | | |
| | | 426 | AACTCTTCCAGTTAGGATCTAGAAC | | |
| | | 427 | GATGCGAACATAGTACACTGCAGCC | | |
| | | 428 | ATTACAAGCATGCGCCGACGATGCC | | |
| | | 429 | GACGATGCCCAGAATCCAGAACTTT | | |
| NPIP | 204538_x_at | 430 | CCTTCCACCCTCAGCGGATGATAAT | cagatgcaaaatcaccccttctgcaagaaagcctctttgcaaccgggtcagaa | NM_006985.1 |
| | | | | tggcggcagtggagcatcgtcattcttcaggattgccctactggccctacctc | |
| | | | | acagctgaaactttaaaaaacaggatgggccaccagccacctcctccaactca | |
| | | | | acaacattctataattgataactccctgagcctcaagacaccttccgagtgtc | |
| | | | | tgctcactccccttccaccctcagctctaccctcagcggatgataatctcaag | |
| | | | | acacctgcggagtgtctgctctatccccttccaccctcagcggatgataatct | |
| | | | | caagacacctcccgagtgtctgctcactccccttccaccctcagctccaccct | |
| | | | | cagcggatgataatctcaagacacctcccgagtgtgtctgctcactccccttccaccc | |
| | | | | tcagcggatgataat | |
| | | 431 | CAGATGCAAAATCACCCCTTCTGCA | | |
| | | 432 | GCCTCTTTGCAACCGGGTCAGAATG | | |
| | | 433 | GAATGGCGGCAGTGGAGCATCGTCA | | |
| | | 434 | CATCGTCATTCTTCAGGATTGCCCT | | |
| | | 435 | TGATAACTCCCTGAGCCTCAAGACA | | |
| | | 436 | AGCTCTACCCTCAGCGGATGATAAT | | |
| | | 437 | GACACCTGCGGAGTGTCTGCTCTAT | | |
| | | 438 | TGATAATCTCAAGACACCTCCCGAG | | |
| | | 439 | GCTCCACCCTCAGCGGATGATAATC | | |
| | | 440 | AAGACACCTCCCGAGTGTGTCTGCT | | |
| ADA | 204639_at | 441 | GTGGGGCTGAGCAACATTTTTACAT | gtggggctgagcaacatttttacatttattccttccaagaagaccatgatctc | NM_000022.1 |
| | | | | aatagtcagttactgatgctcctgaaccctatgtgtccatttctgcacacacg | |
| | | | | tatacctcggcatggccgcgtcacttctctgattatgtgccctggcagggacc | |
| | | | | agcgcccttgcacatgggcatggttgaatctgaaaccctccttctgtggcaacttgta | |
| | | | | ctga | |
| | | 442 | TTTTACATTTATTCCTTCCAAGAAG | | |
| | | 443 | GACCATGATCTCAATAGTCAGTTAC | | |
| | | 444 | GTCAGTTACTGATGCTCCTGAACCC | | |
| | | 445 | TGAACCCTATGTGTCCATTTCTGCA | | |
| | | 446 | ATGTGTCCATTTCTGCACACACGTA | | |
| | | 447 | GCGTCACTTCTCTGATTATGTGCCC | | |
| | | 448 | GATTATGTGCCCTGGCAGGGACCAG | | |
| | | 449 | CAGCGCCCTTGCACATGGGCATGGT | | |
| | | 450 | TGGTTGAATCTGAAACCCTCCTTCT | | |
| | | 451 | CTCCTTCTGTGGCAACTTGTACTGA | | |
| TGFBR3 | 204731_at | 452 | TGTATTTCTTACAGGCCTACAGAAA | tgtatttcttacaggcctacagaaattgaaaatgaccaaaatcaggaaccaca | NM_003243.1 |
| | | | | gatttgtgcccattcctaatattttgttctgcaaattaatgtataatttgagg | |
| | | | | tgaaattcagttataaagtcaaggacgaatttgcacagtgatatatttctatg | |
| | | | | tgtatgcaagtacaagtatataatatgtcacctggcacattcattttctcagt | |
| | | | | tgaagaagagaaaatttgaaaatgtccttatgcttttagagttgcaacttaag | |
| | | | | tatatttggtagggtgagtgtttccactcaaaatatgtcaacttaaaaaaaaa | |
| | | | | taggccctttcataaaaaccaaactgtagcaagatgcaaatgcatggcaaatc | |
| | | | | tgtcggtctccagttggttatctgaatagtgtcaccaattccaccaagacagtgctga | |
| | | | | gat | |
| | | 453 | GATTTGTGCCCATTCCTAATATTTT | | |
| | | 454 | GTCAAGGACGAATTTGCACAGTGAT | | |
| | | 455 | AAGTATATAATATGTCACCTGGCAC | | |
| | | 456 | CACCTGGCACATTCATTTTCTCAGT | | |
| | | 457 | AATGTCCTTATGCTTTTAGAGTTGC | | |
| | | 458 | TTTGGTAGGGTGAGTGTTTCCACTC | | |
| | | 459 | ATGCATGGCAAATCTGTCGGTCTCC | | |
| | | 460 | GTCGGTCTCCAGTTGGTTATCTGAA | | |
| | | 461 | GAATAGTGTCACCAATTCCACCAAG | | |
| | | 462 | AATTCCACCAAGACAGTGCTGAGAT | | |
| IARS | 204744_s_at | 463 | TTGGCCTTCGGAGCAGGAAGCTAAA | ttggccttcggagcaggaagctaaagctgtttctgaatgagacccaaacgcag | NM_013417.1 |
| | | | | gaaattacagaagacatccccgtgaagactttgaatatgaagactgtgtatgt | |
| | | | | ttctgtgttaccaacaacagcagacttctagcatgtacttatcaatgttgttc | |
| | | | | ggtcagcccttccctaattacacctatcccctacacatacatgcacatagaca | |
| | | | | cacacatgaacacactgaagatatttccttcaggtgtgtgtaaaatatgctgc | |
| | | | | ttggattgaaattcaaatgggattgattagtcaagtaacttgagacctcacag | |
| | | | | taatcttcacacttaaccttagacacctatgcagtcatgttgggagcaggtta | |
| | | | | caatgttacttcagcccacagtttatttctattcttgagttcttaagtacaga | |
| | | | | agatagaagtgatttaaatggcatagtatatatatcattttctggccttttaa | |
| | | | | aatttatttgagacctcttgatgaaatggacatattatatatttctgccacctggatt | |
| | | | | ttcctggata | |
| | | 464 | GAAGACATCCCCGTGAAGACTTTGA | | |
| | | 465 | GTTACCAACAACAGCAGACTTCTAG | | |
| | | 466 | GCAGACTTCTAGCATGTACTTATCA | | |
| | | 467 | TGAGACCTCACAGTAATCTTCACAC | | |
| | | 468 | CTTCACACTTAACCTTAGACACCTA | | |
| | | 469 | GACACCTATGCAGTCATGTTGGGAG | | |
| | | 470 | AGGTTACAATGTTACTTCAGCCCAC | | |
| | | 471 | TGTTACTTCAGCCCACAGTTTATTT | | |
| | | 472 | CATATTATATATTTCTGCCACCTGG | | |
| | | 473 | TCTGCCACCTGGATTTTCCTGGATA | | |
| LCK | 204891_s_at | 474 | GACTTGGGGAGATGGAGTTCTTGTG | gacttggggagatggagttcttgtgccatagtcacatggcctatgcacatatg | NM_005356.1 |
| | | | | gactctgcacatgaatcccacccacatgtgacacatatgcaccttgtgtctgt | |
| | | | | acacgtgtcctgtagttgcgtggactctgcacatgtcttgtgcatgtgtagcc | |
| | | | | tgtgcatgtatgtcttggacactgtacaaggtacccctttctggctctcccat | |
| | | | | ttcctgagaccaccagagagaggggagaagcctgggattgacagaagcttctg | |
| | | | | cccacctacttttctttcctcagatcatccagaagttcctgaagggccaggactttat | |
| | | | | ctaatacctctgtgtgctc | |
| | | 475 | TGGAGTTCTTGTGCCATAGTCACAT | | |
| | | 476 | TATGGACTCTGCACATGAATCCCAC | | |
| | | 477 | AATCCCACCCACATGTGACACATAT | | |
| | | 478 | ACATATGCACCTTGTGTCTGTACAC | | |
| | | 479 | TGTGTAGCCTGTGCATGTATGTCTT | | |
| | | 480 | GCATGTATGTCTTGGACACTGTACA | | |
| | | 481 | CACTGTACAAGGTACCCCTTTCTGG | | |
| | | 482 | GCCTGGGATTGACAGAAGCTTCTGC | | |
| | | 483 | GGGCCAGGACTTTATCTAATACCTC | | |
| | | 484 | CTTTATCTAATACCTCTGTGTGCTC | | |
| IL10RA | 204912_at | 485 | TAGGCCATTTGGACTCTGCCTTCAA | taggccatttggactctgccttcaaacaaaggcagttcagtccacaggcatgg | NM_001558.1 |
| | | | | aagctgtgaggggacaggcctgtgcgtgccatccagagtcatctcagccctgc | |
| | | | | ctttctctggagcattctgaaaacagatattctggcccagggaatccagccat | |
| | | | | gacccccacccctctgccaaagtactcttaggtgccagtctggtaactgaact | |
| | | | | ccctctggaggcaggcttgagggaggattcctcagggttcccttgaaagcttt | |
| | | | | atttatttattttgttcatttatttattggagaggcagcattgcacagtgaaa | |
| | | | | gaattctggatatctcaggagccccgaaattctagctctgactttgctgtttc | |
| | | | | cagtggtatgaccttggagaagtcacttatcctcttggagcctcagtttcctc | |
| | | | | atctgcagaataatgactgacttgtctaattcatagggatgtgaggttctgctgagg | |
| | | 486 | GGCAGTTCAGTCCACAGGCATGGAA | | |
| | | 487 | CTGGCCCAGGGAATCCAGCCATGAC | | |
| | | 488 | AGTACTCTTAGGTGCCAGTCTGGTA | | |
| | | 489 | GTAACTGAACTCCCTCTGGAGGCAG | | |
| | | 490 | TCAGGGTTCCCTTGAAAGCTTTATT | | |
| | | 491 | ATTCTGGATATCTCAGGAGCCCCGA | | |
| | | 492 | GGAGCCCCGAAATTCTAGCTCTGAC | | |
| | | 493 | GCTGTTTCCAGTGGTATGACCTTGG | | |
| | | 494 | AGAAGTCACTTATCCTCTTGGAGCC | | |
| | | 495 | ATAGGGATGTGAGGTTCTGCTGAGG | | |
| FCN1 | 205237_at | 496 | GGTATCAACTGGAGTGCGGCGAAGG | gagggcaaccaccagtttgctaagtacaaatcattcaaggtggctgacgaggc | NM_002003.2 |
| | | | | agagaagtacaagctggtactgggagcctttgtcgggggcagtgcgggtaat | |
| | | | | ctctaacgggccacaacaacaacttcttctccaccaaagaccaagacaatgat | |
| | | | | gtgagttcttcgaattgtgctgagaagttccagggagcctggtggtacgccga | |
| | | | | ctgtcatgcttcaaacctcaatggtctctacctcatgggaccccatgagagct | |
| | | | | atgccaatggtatcaactggagtgcggcgaaggggtacaaatatagctacaag | |
| | | | | gtgtcagagatgaaggtgcggcccgcctagacgggccaggacccctccacatg | |
| | | | | cacctgctagtggggaggccacacccacaagcgctgcgtcgtggaag | |
| | | 497 | CCTCCACATGCACCTGCTAGTGGGG | | |
| | | 498 | ACCCACAAGCGCTGCGTCGTGGAAG | | |
| | | 499 | GAGGGCAACCACCAGTTTGCTAAGT | | |
| | | 500 | GGGCAGTGCGGGTAATTCTCTAACG | | |
| | | 501 | TTCTCTAACGGGCCACAACAACAAC | | |
| | | 502 | GTGAGTTCTTCGAATTGTGCTGAGA | | |
| | | 503 | TCCAGGGAGCCTGGTGGTACGCCGA | | |
| | | 504 | GACTGTCATGCTTCAAACCTCAATG | | |
| | | 505 | CTCAATGGTCTCTACCTCATGGGAC | | |
| | | 506 | ATGGGACCCCATGAGAGCTATGCCA | | |
| IL2RB | 205291_at | 507 | GACAAGCGTTGAGCCACTAAGCAGA | gacaagcgttgagccactaagcagaggaccttgggttcccaatacaaaaatac | NM_000878.1 |
| | | | | ctactgctgagagggctgctgaccatttggtcaggattcctgttgcctttata | |
| | | | | tccaaaataaactcccctttcttgaggttgtctgagtcttgggtctatgcctt | |
| | | | | gaaaaaagctgaattattggacagtctcacctcctgccatagggtcctgaatg | |
| | | | | tttcagaccacaaggggctccacacctttgctgtgtgttctggggcaacctac | |
| | | | | taatcctctctgcaagtcggtctccttatccccccaaatggaaattgtatttg | |
| | | | | ccttctccactttgggaggctcccacttcttgggagggttacattttttaagt | |
| | | | | cttaatcatttgtgacatatgtatctatacatccgtatcttttaatgatccgtgtgta | |
| | | | | ccatctttgtgat | |
| | | 508 | TAAGCAGAGGACCTTGGGTTCCCAA | | |
| | | 509 | TGAGAGGGCTGCTGACCATTTGGTC | | |
| | | 510 | GATTCCTGTTGCCTTTATATCCAAA | | |
| | | 511 | CTTTCTTGAGGTTGTCTGAGTCTTG | | |
| | | 512 | CTGAGTCTTGGGTCTATGCCTTGAA | | |
| | | 513 | AATTATTGGACAGTCTCACCTCCTG | | |
| | | 514 | CCTCCTGCCATAGGGTCCTGAATGT | | |
| | | 515 | TTTGCTGTGTGTTCTGGGGCAACCT | | |
| | | 516 | GGAAATTGTATTTGCCTTCTCCACT | | |
| | | 517 | GATCCGTGTGTACCATCTTTGTGAT | | |
| GNA15 | 205349_at | 518 | AACGGCCATTTGGGATGCCAGGGTG | aacggccatttgggatgccagggtggatgaaaaggtgaagaaatcaggggatt | NM_002068.1 |
| | | | | gagacttgggtgggtgggcatctctcaggagccccatctccgggcgtgtcacc | |
| | | | | tcctgggcagggttctgggaccctctgtgggtgacgcacaccctgggatgggg | |
| | | | | ctagtagagccttcaggcgccttcgggcgtggactctggcgcactctagtgga | |
| | | | | caggagaaggaacgccttccaggaacctgtggactaggggtgcagggacttcc | |
| | | | | ctttgcaaggggtaacagaccgctggaaaacactgtcactttcagagctcggt | |
| | | | | ggctcacagcgtgtcctgccccggtttgcggacgagagaaatcgcggcccaca | |
| | | | | agcatcccccatcccttgcaggctgggggctgggcatgctgcatcttaaccttttgta | |
| | | | | tttat | |
| | | 519 | GAGACTTGGGTGGGTGGGCATCTCT | | |
| | | 520 | TGACGCACACCCTGGGATGGGGCTA | | |
| | | 521 | GGGCTAGTAGAGCCTTCAGGCGCCT | | |
| | | 522 | ACTCTGGCGCACTCTAGTGGACAGG | | |
| | | 523 | GAACGCCTTCCAGGAACCTGTGGAC | | |
| | | 524 | CTAGGGGTGCAGGGACTTCCCTTTG | | |
| | | 525 | CAGACCGCTGGAAAACACTGTCACT | | |
| | | 526 | AACACTGTCACTTTCAGAGCTCGGT | | |
| | | 527 | GCGGACGAGAGAAATCGCGGCCCAC | | |
| | | 528 | CTGCATCTTAACCTTTTGTATTTAT | | |
| GZMA | 205488_at | 529 | CAGCCACACGCGAAGGTGACCTTAA | cagccacacgcgaaggtgaccttaaacttttacagctgacggaaaaagcaaaa | NM_006144.2 |
| | | | | attaacaaatatgtgactatccttcatctacctaaaaagggggatgatgtgaa | |
| | | | | accaggaaccatgtgccaagttgcagggtgggggaggactcacaatagtgcat | |
| | | | | cttggtccgatactctgagagaagtcaatatcaccatcatagacagaaaagtc | |
| | | | | tgcaatgatcgaaatcactataattttaaccctgtgattggaatgaatatggt | |
| | | | | ttgtgctggaagcctccgaggtggaagagactcgtgcaatggagattctggaa | |
| | | | | gccctttgttgtgcgagggtgttttccgaggggtcacttcctttggccttgaa | |
| | | | | aataaatgcggagaccctcgtgggcctggtgtctatattcttctctcaaagaaacacc | |
| | | | | tcaactgga | |
| | | 530 | GACCTTAAACTTTTACAGCTGACGG | | |
| | | 531 | TATGTGACTATCCTTCATCTACCTA | | |
| | | 532 | GGAACCATGTGCCAAGTTGCAGGGT | | |
| | | 533 | GACTCACAATAGTGCATCTTGGTCC | | |
| | | 534 | GCATCTTGGTCCGATACTCTGAGAG | | |
| | | 535 | TGCTGGAAGCCTCCGAGGTGGAAGA | | |
| | | 536 | TGTTGTGCGAGGGTGTTTTCCGAGG | | |
| | | 537 | AATAAATGCGGAGACCCTCGTGGGC | | |
| | | 538 | CTGGTGTCTATATTCTTCTCTCAAA | | |
| | | 539 | CTCTCAAAGAAACACCTCAACTGGA | | |
| KLRK1 | 205821_at | 540 | AGGCAATTCAGATATCCCCAAGGCT | aggcaattcagatatccccaaggctgcctctcccaccacaagcccagagtgga | NM_007360.1 |
| | | | | tgggctgggggaggggtgctgttttaatttctaaaggtaggaccaacacccag | |
| | | | | gggatcagtgaaggaagagaaggccagcagatcagtgagagtgcaaccccacc | |
| | | | | ctccacaggaaattgcctcatgggcagggccacagcagagagacacagcatgg | |
| | | | | gcagtgccttccctgcctgtgggggtcatgctgccacttttaatgggtcctcc | |
| | | | | acccaacggggtcagggaggtggtgctgccccagtgggccatgattatcttaa | |
| | | | | aggcattattctccagccttaagatcttaggacgtttcctttgctatgatttg | |
| | | | | tacttgcttgagtcccatgactgtttctcttcctctctttcttccttttggaa | |
| | | | | tagtaatatccatcctatgtttgtcccactattgta | |
| | | 541 | GTAGGACCAACACCCAGGGGATCAG | | |
| | | 542 | AGATCAGTGAGAGTGCAACCCCACC | | |
| | | 543 | CACCCTCCACAGGAAATTGCCTCAT | | |
| | | 544 | AATTGCCTCATGGGCAGGGCCACAG | | |
| | | 545 | CTGCCACTTTTAATGGGTCCTCCAC | | |
| | | 546 | GGCATTATTCTCCAGCCTTAAGATC | | |
| | | 547 | GATCTTAGGACGTTTCCTTTGCTAT | | |
| | | 548 | GATTTGTACTTGCTTGAGTCCCATG | | |
| | | 549 | TTGAGTCCCATGACTGTTTCTCTTC | | |
| | | 550 | ATCCTATGTTTGTCCCACTATTGTA | | |
| CD2 | 205831_at | 551 | AGACCTCGAGTTCAGCCAAAACCTC | agacctcgagttcagccaaaacctccccatggggcagcagaaaactcattgtc | NM_001767.1 |
| | | | | cccttcctctaattaaaaaagatagaaactgtctttttcaataaaaagcactg | |
| | | | | tggatttctgccctcctgatgtgcatatccgtacttccatgaggtgttttctg | |
| | | | | tgtgcagaacattgtcacctcctgaggctgtgggccacagccacctctgcatc | |
| | | | | ttcgaactcagccatgtggtcaacatctggagtttttggtctcctcagagagc | |
| | | | | tccatcacaccagtaaggagaagcaatataagtgtgattgcaagaatggtaga | |
| | | | | ggaccgagcacagaaatcttagagatttcttgtcccctctcaggtcatgtgta | |
| | | | | gatgcgataaatcaagtgattggtgtgcctgggtctcactacaagcagcctatctgc | |
| | | 552 | GGCAGCAGAAAACTCATTGTCCCCT | | |
| | | 553 | AAAAGCACTGTGGATTTCTGCCCTC | | |
| | | 554 | CTGATGTGCATATCCGTACTTCCAT | | |
| | | 555 | GTACTTCCATGAGGTGTTTTCTGTG | | |
| | | 556 | TGTGCAGAACATTGTCACCTCCTGA | | |
| | | 557 | GAGTTTTTGGTCTCCTCAGAGAGCT | | |
| | | 558 | AGAGCTCCATCACACCAGTAAGGAG | | |
| | | 559 | AATCTTAGAGATTTCTTGTCCCCTC | | |
| | | 560 | TCCCCTCTCAGGTCATGTGTAGATG | | |
| | | 561 | GTCTCACTACAAGCAGCCTATCTGC | | |
| CX3CR1 | 205898_at | 562 | AGCCCCTGCCCATCTGGGAAAATAC | agcccctgcccatctgggaaaataccccatcattcatgctactgccaacctgg | U20350.1 |
| | | | | ggagccagggctatgggagcagcttttttttcccccctagaaacgtttggaac | |
| | | | | aatgtaaaactttaaagctcgaaaacaattgtaataatgctaaagaaaaagtc | |
| | | | | atccaatctaaccacatcaatattgtcattcctgtattcacccgtccagacct | |
| | | | | tgttcacactctcacatgtttagagttgcaatcgtaatgtacagatggtttta | |
| | | | | taatctgatttgttttcctcttaacgttagaccacaaatagtgctcgctttct | |
| | | | | atgtagtttggtaattatcattttagaagactctaccagactgtgtattcatt | |
| | | | | gaagtcagatgtggtaactgttaaattgctgtgtatctgatagctctttggca | |
| | | | | gtctatatgtttgtataatgaatgagagaataagtcatgttccttcaagatcatgtac | |
| | | | | cccaatttacttgccattact | |
| | | 563 | GAAAATACCCCATCATTCATGCTAC | | |
| | | 564 | GGCTATGGGAGCAGCTTTTTTTTCC | | |
| | | 565 | GTCATCCAATCTAACCACATCAATA | | |
| | | 566 | CTTGTTCACACTCTCACATGTTTAG | | |
| | | 567 | TTATAATCTGATTTGTTTTCCTCTT | | |
| | | 568 | GACCACAAATAGTGCTCGCTTTCTA | | |
| | | 569 | GTGCTCGCTTTCTATGTAGTTTGGT | | |
| | | 570 | GAAGACTCTACCAGACTGTGTATTC | | |
| | | 571 | TGTTCCTTCAAGATCATGTACCCCA | | |
| | | 572 | GTACCCCAATTTACTTGCCATTACT | | |
| HK3 | 205936_s_at | 573 | AGGTCCGAGCCATCCTAGAGGATCT | aggtccgagccatcctagaggatctggggctacccctgacctcagatgacgcc | NM_002115.1 |
| | | | | ctgatggtgctagaggtgtgccaggctgtgtcccagagggctgcccagctctg | |
| | | | | tggggcgggtgtagctgccgtggtggagaagatccgggggaaccggggcctgg | |
| | | | | aagagctggcagtgtctgtgggggtggatggaacgctctacaagctgcacccg | |
| | | | | cgcttctccagcctggtggcggccacagtgcgggagctggcccctcgctgtgt | |
| | | | | ggtcacgttcctgcagtcagaggatgggtccggcaaaggtgcggccctggtca | |
| | | | | ccgctgttgcctgccgccttgcgcagttgactcgtgtctgaggaaacctccag | |
| | | | | gctgaggaggtctccgccgcagccttgctggagccgggtcggggtctgcctgt | |
| | | | | ttcccagccaggcccagccacccaggactcctgggacatcccatgtgtgaccc | |
| | | | | ctctgcggccatttggccttgctccctggctttccctgagagaagtagcactcaggtt | |
| | | | | agcaatat | |
| | | 574 | CTAGAGGATCTGGGGCTACCCCTGA | | |
| | | 575 | TGACCTCAGATGACGCCCTGATGGT | | |
| | | 576 | GACGCCCTGATGGTGCTAGAGGTGT | | |
| | | 577 | GGTGTAGCTGCCGTGGTGGAGAAGA | | |
| | | 578 | GTCTGTGGGGGTGGATGGAACGCTC | | |
| | | 579 | GATGGAACGCTCTACAAGCTGCACC | | |
| | | 580 | GGATGGGTCCGGCAAAGGTGCGGCC | | |
| | | 581 | TGACTCGTGTCTGAGGAAACCTCCA | | |
| | | 582 | GACTCCTGGGACATCCCATGTGTGA | | |
| | | 583 | GAAGTAGCACTCAGGTTAGCAATAT | | |
| ING2 | 205981_s_at | 584 | GATGGATTCCAGCCAACCAGAAAGA | gatggattccagccaaccagaaagatcttcaagaagaccccgcaggcagcgga | NM_001564.1 |
| | | | | ccagtgaaagccgtgatttatgtcacatggcaaatgggattgaagactgtgat | |
| | | | | gatcagccacctaaagaaaagaaatccaagtcagcaaagaaaaagaaacgctc | |
| | | | | caaggccaagcaggaaagggaagcttcacctgttgagtttgcaatagatccta | |
| | | | | atgaacctacatactgcttatgcaaccaagtgtcttatggggagatgatagga | |
| | | | | tgtgacaatgaacagtgtccaattgaatggtttcacttttcatgtgtttcact | |
| | | | | tacctataaaccaaaggggaaatggtattgcccaaagtgcaggggagataatg | |
| | | | | agaaaacaatggacaaaagtactgaaaagacaaaaaaggatagaagatcgaggtagta | |
| | | | | aaggccatccacattt | |
| | | 585 | GGCAGCGGACCAGTGAAAGCCGTGA | | |
| | | 586 | AAAGCCGTGATTTATGTCACATGGC | | |
| | | 587 | AAGACTGTGATGATCAGCCACCTAA | | |
| | | 588 | GAAAAAGAAACGCTCCAAGGCCAAG | | |
| | | 589 | GGGAAGCTTCACCTGTTGAGTTTGC | | |
| | | 590 | GATCCTAATGAACCTACATACTGCT | | |
| | | 591 | TACTGCTTATGCAACCAAGTGTCTT | | |
| | | 592 | TTTCATGTGTTTCACTTACCTATAA | | |
| | | 593 | GGGGAAATGGTATTGCCCAAAGTGC | | |
| | | 594 | GAGGTAGTAAAGGCCATCCACATTT | | |
| STAT4 | 206118_at | 595 | GCTGACATCCTGCGAGACTACAAAG | gctgacatcctgcgagactacaaagttattatggctgaaaacattcctgaaaa | NM_003151.1 |
| | | | | ccctctgaagtacctatatcctgacattcccaaagacaaagccttcggtaaac | |
| | | | | actacagctctcagccttgcgaagtttcaagaccaacagaaaggggtgacaaa | |
| | | | | ggttatgttccttctgtttttatccccatctcaacaatccgaagtgattcaac | |
| | | | | agagccacattctccatcagaccttcttcccatgtctccaagtgtgtatgcgg | |
| | | | | tgttgagagaaaacctgagtcccacaacaattgaaactgcaatgaagtctcct | |
| | | | | tattctgctgaatgacaggataaactctgacgcaccaagaaaggaagcaaatg | |
| | | | | aaaaagtttaaagactgttctttgcccaataaccacattttatttcttcagct | |
| | | | | ttgtaaataccaggttctaggaaatgtttgacatctgaagctctcttcacactcccgt | |
| | | | | ggcactcctcaattgggag | |
| | | 596 | TCCTGAAAACCCTCTGAAGTACCTA | | |
| | | 597 | GAAGTACCTATATCCTGACATTCCC | | |
| | | 598 | CAAAGCCTTCGGTAAACACTACAGC | | |
| | | 599 | GCTCTCAGCCTTGCGAAGTTTCAAG | | |
| | | 600 | TCCCCATCTCAACAATCCGAAGTGA | | |
| | | 601 | AAACCTGAGTCCCACAACAATTGAA | | |
| | | 602 | TGCAATGAAGTCTCCTTATTCTGCT | | |
| | | 603 | AGACTGTTCTTTGCCCAATAACCAC | | |
| | | 604 | GACATCTGAAGCTCTCTTCACACTC | | |
| | | 605 | TCCCGTGGCACTCCTCAATTGGGAG | | |
| CD33 | 206120_at | 606 | GAGGAGCTGCATTATGCTTCCCTCA | agtgggcagcaatgacacccaccctaccacagggtcagcctccccgaaacacc | NM_001772.1 |
| | | | | agaagaactccaagttacatggccccactgaaacctcaagctgttcaggtgcc | |
| | | | | gcccctactgtggagatggatgaggagctgcattatgcttccctcaactttca | |
| | | | | tgggatgaatccttccaaggacacctccaccgaatactcagaggtcaggaccc | |
| | | | | agtgaggaaccctcaagagcatcaggctcagctagaagatccacatcctctac | |
| | | | | aggtcggggaccaaaggctgattcttggagatttaactccccacaggcaatgg | |
| | | | | gtttatagacattatgtgagtttcctgctatattaacatcatcttgagacttt | |
| | | | | gcaagcagagagtcgtggaatcaaatctgtgctctttcatt | |
| | | 607 | ATGCTTCCCTCAACTTTCATGGGAT | | |
| | | 608 | ATGAATCCTTCCAAGGACACCTCCA | | |
| | | 609 | GACACCTCCACCGAATACTCAGAGG | | |
| | | 610 | AGGAACCCTCAAGAGCATCAGGCTC | | |
| | | 611 | TAGAAGATCCACATCCTCTACAGGT | | |
| | | 612 | AGGTCGGGGACCAAAGGCTGATTCT | | |
| | | 613 | GGAATCAAATCTGTGCTCTTTCATT | | |
| | | 614 | AGTGGGCAGCAATGACACCCACCCT | | |
| | | 615 | AGAACTCCAAGTTACATGGCCCCAC | | |
| | | 616 | AAACCTCAAGCTGTTCAGGTGCCGC | | |
| ASGR2 | 206130_s_at | 617 | TGCAGGTGTACCGCTGGGTGTGTGA | ggagaacgcacacctggtggtcatcaactcctgggaggagcagaaattcattg | NM_001181.1 |
| | | | | tacaacacacgaaccccttcaatacctggataggtctcacggacagtgatggc | |
| | | | | tcttggaaatgggtggatggcacagactataggcacaactacaagaactgggc | |
| | | | | tgtcactcagccagataattggcacgggcacgagctgggtggaagtgaagact | |
| | | | | gtgttgaagtccagccggatggccgctggaacgatgacttctgcctgcaggtg | |
| | | | | taccgctgggtgtgtgagaaaaggcggaatgccaccggcgaggtggcctgacc | |
| | | | | ccagcacacctctggctaacccataccccacacctgcccagctctggcttctc | |
| | | | | tgttgaggattttgaggaaaggaagaaacactgagacaggggtatggggaaga | |
| | | | | gctgagcaaagagagaaaggaggtagtttaagagtccctgaccctggaggact | |
| | | | | gagatcccacctccttctgtaattcattgtaattattataatcgtcagcctcttcaa | |
| | | 618 | ATGCCACCGGCGAGGTGGCCTGACC | | |
| | | 619 | GGTAGTTTAAGAGTCCCTGACCCTG | | |
| | | 620 | CCCTGGAGGACTGAGATCCCACCTC | | |
| | | 621 | TTATTATAATCGTCAGCCTCTTCAA | | |
| | | 622 | GGAGAACGCACACCTGGTGGTCATC | | |
| | | 623 | TCATTGTACAACACACGAACCCCTT | | |
| | | 624 | GAACCCCTTCAATACCTGGATAGGT | | |
| | | 625 | TAATTGGCACGGGCACGAGCTGGGT | | |
| | | 626 | TGTTGAAGTCCAGCCGGATGGCCGC | | |
| | | 627 | GGCCGCTGGAACGATGACTTCTGCC | | |
| MATK | 206267_s_at | 628 | GCCGAGCGGAAGGGGCTAGACTCAA | gccgagcggaaggggctagactcaagccggctgcccgtcaagtggacggcgcc | NM_002378.1 |
| | | | | cgaggctctcaaacacgggttcaccagcaagtcggatgtctggagttttgggg | |
| | | | | tgctgctctgggaggtcttctcatatggacgggctccgtaccctaaaatgtca | |
| | | | | ctgaaagaggtgtcggaggccgtggagaaggggtaccgcatggaaccccccga | |
| | | | | gggctgtccaggccccgtgcacgtcctcatgagcagctgctgggaggcagagc | |
| | | | | cgcccgccggccacccttccgcaaactggccgagaagctggcccgggagctac | |
| | | | | gcagtgcaggtgccccagcctccgtctcagggcaggacgccgacggtccacct | |
| | | | | cgccccgaagccaggagccctgaccccacccggtggcccttggccccagaggaccgag | |
| | | | | agagtggagagtgcggcgtgggggcac | |
| | | 629 | GAAGGGGCTAGACTCAAGCCGGCTG | | |
| | | 630 | GTTCACCAGCAAGTCGGATGTCTGG | | |
| | | 631 | GCAAGTCGGATGTCTGGAGTTTTGG | | |
| | | 632 | CTCTGGGAGGTCTTCTCATATGGAC | | |
| | | 633 | TCTTCTCATATGGACGGGCTCCGTA | | |
| | | 634 | GCTCCGTACCCTAAAATGTCACTGA | | |
| | | 635 | CTGAAAGAGGTGTCGGAGGCCGTGG | | |
| | | 636 | AGGCCGTGGAGAAGGGGTACCGCAT | | |
| | | 637 | CCGTCTCAGGGCAGGACGCCGACGG | | |
| | | 638 | AGTGGAGAGTGCGGCGTGGGGGCAC | | |
| ASGR1 | 206743_s_at | 639 | CTACCGCTGGGTCTGCGAGACAGAG | aggagcagaaatttgtccagcaccacataggccctgtgaacacctggatgggc | NM_001671.1 |
| | | | | ctccacgaccaaaacgggccctggaagtgggtggacgggacggactacgagac | |
| | | | | gggcttcaagaactggaggccggagcagccggacgactggtacggccacgggc | |
| | | | | tcggaggaggcgaggactgtgcccacttcaccgacgacggccgctggaacgac | |
| | | | | gacgtctgccagaggccctaccgctgggtctgcgagacagagctggacaaggc | |
| | | | | cagccaggagccacctctcctttaatttatttcttcaatgcctcgacctgccg | |
| | | | | caggggtccgggattgggaatccgcccatctggggcctcttctgctttctcgg | |
| | | | | gaattttcatctaggattttaagggaaggggaaggatagggtgatgttccgaaggtga | |
| | | | | ggagcttgaaacccgtggcg | |
| | | 640 | GGGTCTGCGAGACAGAGCTGGACAA | | |
| | | 641 | TGCCGCAGGGGTCCGGGATTGGGAA | | |
| | | 642 | TCTTCTGCTTTCTCGGGAATTTTCA | | |
| | | 643 | CTCGGGAATTTTCATCTAGGATTTT | | |
| | | 644 | GATAGGGTGATGTTCCGAAGGTGAG | | |
| | | 645 | GGTGAGGAGCTTGAAACCCGTGGCG | | |
| | | 646 | AGGAGCAGAAATTTGTCCAGCACCA | | |
| | | 647 | GAAATTTGTCCAGCACCACATAGGC | | |
| | | 648 | CCACATAGGCCCTGTGAACACCTGG | | |
| | | 649 | GAGCAGCCGGACGACTGGTACGGCC | | |
| TXK | 206828_at | 650 | TAGCCCCAGGAACCCTTGAGGTTCT | tagccccaggaacccttgaggttcttcttcacaaggctgagagtgcttccttc | NM_003328.1 |
| | | | | ttgaagacgagtgtcattcatcacttcagtgatccatgcatagaatatgaaaa | |
| | | | | taaattcttccaactcatgggataaaggggactcccttgaagaatttcatgtt | |
| | | | | tttgggctgtatagctctttacagaaaatgcacctttataaatcacatgaatg | |
| | | | | ttagtattctggaaatgtcttttgttaatataatcttcccatgttatttaaca | |
| | | | | aattgtttttgcacatatctgattatattgaaagcagtttttttgcattcgag | |
| | | | | ttttaaacactgttataaaatgtagccaaagctcacctttgaacagatcccgg | |
| | | | | tgacattctatttccaggaaaatccggaacctgattttagttctgtgatttta | |
| | | | | cactttttacatgtgagattggacagtttcagaggccttattttgtcatactaagtg | |
| | | | | tctcctgtaatt | |
| | | 651 | TTGAGGTTCTTCTTCACAAGGCTGA | | |
| | | 652 | GACGAGTGTCATTCATCACTTCAGT | | |
| | | 653 | TCACTTCAGTGATCCATGCATAGAA | | |
| | | 654 | GGGACTCCCTTGAAGAATTTCATGT | | |
| | | 655 | GTTTTTGGGCTGTATAGCTCTTTAC | | |
| | | 656 | AGCTCACCTTTGAACAGATCCCGGT | | |
| | | 657 | TCCCGGTGACATTCTATTTCCAGGA | | |
| | | 658 | GAGATTGGACAGTTTCAGAGGCCTT | | |
| | | 659 | TCAGAGGCCTTATTTTGTCATACTA | | |
| | | 660 | GTCATACTAAGTGTCTCCTGTAATT | | |
| KIR3DL2 | 207314_x_at | 661 | GGAACTTCCAAATGCTGAGCCCAGA | ggaacttccaaatgctgagcccagatccaaagttgtctcctgcccacgagcac | NM_006737.1 |
| | | | | cacagtcaggtcttgagggggttttctagggagacaacagccctgtctcaaaa | |
| | | | | ccaggttgccagatccaatgaaccagcagctggaatctgaaggcatcagtctg | |
| | | | | catcttaggggatcgctcttcctcacaccacgaatctgaacatgcctctctct | |
| | | | | tgcttacaaatgcctaaggtcgccactgcctgctgcagagaaaacacactcct | |
| | | | | ttgcttagcccacaaggtatctatttcacttgacccctgcccacctctccaac | |
| | | | | ctaactggcttacttcctagtcctacttgaggctgcaatcacactgaggaact | |
| | | | | cacaattccaaacatacaagaggctccctcttaacacggcacttacacacttg | |
| | | | | ctgttccaccttccctcatgctgttccacctcccctcagactatctttcagcc | |
| | | | | ttctgtcatcagtaaaatttataaattttttttataacttcagtgtagctctctcct | |
| | | 662 | AGCCCAGATCCAAAGTTGTCTCCTG | | |
| | | 663 | CCACGAGCACCACAGTCAGGTCTTG | | |
| | | 664 | CAGTCTGCATCTTAGGGGATCGCTC | | |
| | | 665 | ACACCACGAATCTGAACATGCCTCT | | |
| | | 666 | AAGGTATCTATTTCACTTGACCCCT | | |
| | | 667 | TCTCCAACCTAACTGGCTTACTTCC | | |
| | | 668 | CTTCCTAGTCCTACTTGAGGCTGCA | | |
| | | 669 | AACACGGCACTTACACACTTGCTGT | | |
| | | 670 | TATCTTTCAGCCTTCTGTCATCAGT | | |
| | | 671 | TATAACTTCAGTGTAGCTCTCTCCT | | |
| SH2D2A | 207351_s_at | 672 | CACCCTGTCCTACGGAAGAGCTGGT | caccctgtcctacggaagagctggtccaggcctgtcccaggaggccagaatac | NM_003975.1 |
| | | | | aggtggctcccagctgcattctgagaactctgtgattgggcaaggccctcccc | |
| | | | | tgccccaccagcccccacccgcctggagacacaccctcccccacaatctttct | |
| | | | | agacaggtgcttcaggacagaggacaggcatggcttccccttgggcctcctca | |
| | | | | gtaggcggtctggcctgacccccaacaaagaagcctggaggtcagagaagcaa | |
| | | | | atgcggagcctgctccctcctaagaagatcccaagaatccaatggctcagtcc | |
| | | | | ttggtgatctaagacagcaaagaagtgtgcaaggagggccctgttagctccca | |
| | | | | ctgtcctggtttctcctcctggagtctaatttccttggccctctgagcctttt | |
| | | | | gagtctgggccctggtccaatgctgctgttgtctgaggaatggtttggtgaga | |
| | | | | acagatgttagaacttgtttgttgattcttgtctggctaat | |
| | | 673 | CTCCCAGCTGCATTCTGAGAACTCT | | |
| | | 674 | GAACTCTGTGATTGGGCAAGGCCCT | | |
| | | 675 | TCCCCCACAATCTTTCTAGACAGGT | | |
| | | 676 | AAGCAAATGCGGAGCCTGCTCCCTC | | |
| | | 677 | CTCCCTCCTAAGAAGATCCCAAGAA | | |
| | | 678 | CAATGGCTCAGTCCTTGGTGATCTA | | |
| | | 679 | GTGCAAGGAGGGCCCTGTTAGCTCC | | |
| | | 680 | TCCTGGAGTCTAATTTCCTTGGCCC | | |
| | | 681 | CTCTGAGCCTTTTGAGTCTGGGCCC | | |
| | | 682 | GTTTGTTGATTCTTGTCTGGCTAAT | | |
| CD160 | 207840_at | 683 | AACAGAACAGCTTTCACCAAAGTGG | tcagtgtaatccttgactttgctcctcaccatcagggcaaacttgccttcttc | NM_007053.1 |
| | | | | cctcctaagctccagtaaataaacagaacagctttcaccaaagtgggtagtat | |
| | | | | agtcctcaaatatcggataaatatatgcgtttttgtaccccagaaaaactttt | |
| | | | | cctccctcttcatcaacatagtaaaataagtcaaacaaaatgagaacaccaaa | |
| | | | | ttttgggggaataaatttttatttaacactgcaaaggaaagagagagaaaaca | |
| | | | | agcaaagataggtaggacagaaaggaagacagccagatccagtgattgacttg | |
| | | | | gcatgaaaatgagaaaatgcagacagacctcaacattcaacattcaacaacat | |
| | | | | ccatacagcactgctggaggaagaggaagatttgtgcagaccaagagcaccac | |
| | | | | agactacaactgcccagcttcatctaaatacttgttaacctctttggtcat | |
| | | 684 | GTGGGTAGTATAGTCCTCAAATATC | | |
| | | 685 | ATATATGCGTTTTTGTACCCCAGAA | | |
| | | 686 | GACAGCCAGATCCAGTGATTGACTT | | |
| | | 687 | CAACAACATCCATACAGCACTGCTG | | |
| | | 688 | AAGAGCACCACAGACTACAACTGCC | | |
| | | 689 | TACAACTGCCCAGCTTCATCTAAAT | | |
| | | 690 | GCCCAGCTTCATCTAAATACTTGTT | | |
| | | 691 | AATACTTGTTAACCTCTTTGGTCAT | | |
| | | 692 | TCAGTGTAATCCTTGACTTTGCTCC | | |
| | | 693 | TTCCCTCCTAAGCTCCAGTAAATAA | | |
| CEACAM3 | 208052_x_at | 694 | ATACCAAGAAAATGCCCCAGGCCTT | ataccaagaaaatgccccaggccttcctgtgggggccgtcgccggcatcgtga | NM_001815.1 |
| | | | | ccggggtcctggtcggagtggcgctggtggccgcgctggtgtgtttcctgctc | |
| | | | | cttgccaaaactggaaggccgtggtccctcccacagctctgccttctcgatgt | |
| | | | | cccctctctccactgcctaggcccccctacccaaccccaggacagcagcttcc | |
| | | | | atctatgagaagtggcttcttagcttcctccaggagctgctcctgtgggttga | |
| | | | | tggagagtccccaaggcccccagccctggggatggggaaggacatgaagcctg | |
| | | | | agccagagaaccagctataagtcctgagaagacactggtgtctggggacaggg | |
| | | | | agggatggggtccctgatgaatatctggagacctcgacagcctgccctaggcc | |
| | | | | ctgggtgggtcaggacaaaggcctctcatcaccgcagaaagcgggggcttgcagggaa | |
| | | | | agtgaatgggcctgtggcccacctg | |
| | | 695 | TTCCTGCTCCTTGCCAAAACTGGAA | | |
| | | 696 | CCAGGACAGCAGCTTCCATCTATGA | | |
| | | 697 | TTCTTAGCTTCCTCCAGGAGCTGCT | | |
| | | 698 | GGGTTGATGGAGAGTCCCCAAGGCC | | |
| | | 699 | GAAGCCTGAGCCAGAGAACCAGCTA | | |
| | | 700 | GGATGGGGTCCCTGATGAATATCTG | | |
| | | 701 | AATATCTGGAGACCTCGACAGCCTG | | |
| | | 702 | GGGTGGGTCAGGACAAAGGCCTCTC | | |
| | | 703 | GCCTCTCATCACCGCAGAAAGCGGG | | |
| | | 704 | AGTGAATGGGCCTGTGGCCCACCTG | | |
| ZBP1 | 208087_s_at | 705 | GGGTTCAGGCCAGGTCTTTTGATGG | gggttcaggccaggtcttttgatggccaggagtagatgacagggagttgcctt | NM_030776.1 |
| | | | | ggggaacctttggtgtgccaagaggaggtgggtagatgggagtggggctcggt | |
| | | | | cccccaggcccaggggactctctccactctttcctgggctcggggcatctgcc | |
| | | | | tggagttaccttccatcatggctacctgctgtggtttgaatgtttgagtccca | |
| | | | | acaaaattcatatcaaaacataatcccaactgggtgcagtggctcacgcctgt | |
| | | | | aatcccagcactttgggaggccgaggcgggcggatcaataggtcaggaaatccagac | |
| | | | | cgtcct | |
| | | 706 | CCAGGTCTTTTGATGGCCAGGAGTA | | |
| | | 707 | GGCCAGGAGTAGATGACAGGGAGTT | | |
| | | 708 | TGCCTTGGGGAACCTTTGGTGTGCC | | |
| | | 709 | TGGGGAACCTTTGGTGTGCCAAGAG | | |
| | | 710 | GGTAGATGGGAGTGGGGCTCGGTCC | | |
| | | 711 | TAGATGGGAGTGGGGCTCGGTCCCC | | |
| | | 712 | GTGGTTTGAATGTTTGAGTCCCAAC | | |
| | | 713 | GAGTCCCAACAAAATTCATATCAAA | | |
| | | 714 | ACATAATCCCAACTGGGTGCAGTGG | | |
| | | 715 | TAGGTCAGGAAATCCAGACCGTCCT | | |
| APLP2 | 208248_x_at | 716 | CCCTTCCAACTATGTCCAGATGTGC | cccttccaactatgtccagatgtgcaggctcctcctctctggactttctccaa | NM_001642.1 |
| | | | | aggcactgaccctcggcctctactttgtcccctcacctccaccccctcctgtc | |
| | | | | accggccttgtgacattcactcagagaagaccacaccaaggaggggccgcggc | |
| | | | | tggcccaggagagaacacggggaggtttgtttgtgtgaaaggaaagtagtcca | |
| | | | | ggctgtccctgaaactgagtctgtggacactgtggaaagctttgaacaattgt | |
| | | | | gttttcgtcacaggagtctttgtaatgcttgtacagttgatgtcgatgctcac | |
| | | | | tgcttctgctttttctttctttttattttaaaaaatctgaaggttctggtaac | |
| | | | | ctgtggtgtatttttattttcctgtgactgtttttgttttgtttttttccttt | |
| | | | | ttcctcccctttagccctattcatgtctctacccactatgcacagattaaacttcac | |
| | | | | ctacaaactcct | |
| | | 717 | TCCTCTCTGGACTTTCTCCAAAGGC | | |
| | | 718 | CCGGCCTTGTGACATTCACTCAGAG | | |
| | | 719 | AGAAGACCACACCAAGGAGGGGCCG | | |
| | | 720 | AGGAAAGTAGTCCAGGCTGTCCCTG | | |
| | | 721 | GCTGTCCCTGAAACTGAGTCTGTGG | | |
| | | 722 | GTGTTTTCGTCACAGGAGTCTTTGT | | |
| | | 723 | CAGTTGATGTCGATGCTCACTGCTT | | |
| | | 724 | GGTGTATTTTTATTTTCCTGTGACT | | |
| | | 725 | TCTCTACCCACTATGCACAGATTAA | | |
| | | 726 | GATTAAACTTCACCTACAAACTCCT | | |
| CS | 208660_at | 727 | AGAATACAAGCCACTACCTTCTGAC | agaatacaagccactaccttctgacctccccaccccccaccaacccccatctt | BC000105.1 |
| | | | | ttaatatgctgtggggcatagaactccggaatgaccagcatgatattttcaga | |
| | | | | gtcttgtccccggggtattagcacctctttttgaacagggaattgattcaaga | |
| | | | | ttggacatggtctcctctgattatcaggtactggggctgagggcattaaaaat | |
| | | | | agtaagcctccctcctcgtcccctgcctcaagaaattgcctccttatttatca | |
| | | | | acatctttttcctccctttccctgagagctcacagtacaatgtttcagaagcc | |
| | | | | ccatttgcacaggttttcagcaactcagaatgctctacttctttttctttgag | |
| | | | | aaaggattaagatacactcctgctgtgcccccatctttcctccaaactcctgc | |
| | | | | ctgtgtttgtgtggatacccagtcccagaaccacactgttgagttggacacactgtaa | |
| | | | | acccct | |
| | | 728 | TGCTGTGGGGCATAGAACTCCGGAA | | |
| | | 729 | TGATATTTTCAGAGTCTTGTCCCCG | | |
| | | 730 | TCTTGTCCCCGGGGTATTAGCACCT | | |
| | | 731 | GGTATTAGCACCTCTTTTTGAACAG | | |
| | | 732 | TGGACATGGTCTCCTCTGATTATCA | | |
| | | 733 | TGCCTCCTTATTTATCAACATCTTT | | |
| | | 734 | GCCCCATTTGCACAGGTTTTCAGCA | | |
| | | 735 | GCAACTCAGAATGCTCTACTTCTTT | | |
| | | 736 | TTGTGTGGATACCCAGTCCCAGAAC | | |
| | | 737 | TGAGTTGGACACACTGTAAACCCCT | | |
| LTA4H | 208771_s_at | 738 | GATTGGAATGCCTGGCTCTACTCTC | gattggaatgcctggctctactctcctggactgcctcccataaagcccaatta | J02959.1 |
| | | | | tgatatgactctgacaaatgcttgtattgccttaagtcaaagatggattactg | |
| | | | | ccaaagaagatgatttaaattcattcaatgccacagacctgaaggatctctct | |
| | | | | tctcatcaattgaatgagtttttagcacagacgctccagagggcacctcttcc | |
| | | | | attggggcacataaagcgaatgcaagaggtgtacaacttcaatgccattaaca | |
| | | | | attctgaaatacgattcagatggctgcggctctgcattcaatccaagtgggag | |
| | | | | gacgcaattcctttggcgctaaagatggcaactgaacaaggaagaatgaagtt | |
| | | | | tacccggcccttattcaaggatcttgctgcctttgacaaatcccatgatcaag | |
| | | | | ctgtccgaacctaccaagagcacaaagcaagcatgcatcccgtgactgcaatgctggt | |
| | | | | gg | |
| | | 739 | GCCACAGACCTGAAGGATCTCTCTT | | |
| | | 740 | GGATCTCTCTTCTCATCAATTGAAT | | |
| | | 741 | GAGTTTTTAGCACAGACGCTCCAGA | | |
| | | 742 | TGGGAGGACGCAATTCCTTTGGCGC | | |
| | | 743 | GGCCCTTATTCAAGGATCTTGCTGC | | |
| | | 744 | TTGCTGCCTTTGACAAATCCCATGA | | |
| | | 745 | AAATCCCATGATCAAGCTGTCCGAA | | |
| | | 746 | GTCCGAACCTACCAAGAGCACAAAG | | |
| | | 747 | CAAAGCAAGCATGCATCCCGTGACT | | |
| | | 748 | CATCCCGTGACTGCAATGCTGGTGG | | |
| ANXA2P2 | 208816_x_at | 749 | CAGAAAGCGCTGCTGTACCTGTGTG | tgccccacctccagaaagtatttgataggtacaagagttacagcccttatgac | M62898.1 |
| | | | | atgttggaaagcatcaggaaagaggttaaaggagacctggaaaatgctttcct | |
| | | | | gaacctggtccagcgcattcagaacaagcccttgtattttgctgatcagctgt | |
| | | | | acgactccatgaagggcaaggggacgcgagataaggtcctgatcagaatcatg | |
| | | | | gtctcccgcagtgaagtggacatgttgaaaattaggtctgaattcaagagaaa | |
| | | | | gtacggcaagtccctgtactactatatccagcaagacactaagggcgactacc | |
| | | | | agaaagcgctgctgtacctgtgtggtggagctgactgaagcccgacacagcct | |
| | | | | gagcgtccagaaatggtgctcaccatgcttccagctaacaggtctactaaaca | |
| | | | | tacaaaagtttagccgggcgtggtggcgctcgcctgtagtcccagctagtccggagc | |
| | | | | tgag | |
| | | 750 | TGGTGGAGCTGACTGAAGCCCGACA | | |
| | | 751 | GACACAGCCTGAGCGTCCAGAAATG | | |
| | | 752 | CTCACCATGCTTCCAGCTAACAGGT | | |
| | | 753 | TAGTCCCAGCTAGTCCGGAGCTGAG | | |
| | | 754 | TGCCCCACCTCCAGAAAGTATTTGA | | |
| | | 755 | CTGAACCTGGTCCAGCGCATTCAGA | | |
| | | 756 | AAGCCCTTGTATTTTGCTGATCAGC | | |
| | | 757 | CTGATCAGCTGTACGACTCCATGAA | | |
| | | 758 | CTGATCAGAATCATGGTCTCCCGCA | | |
| | | 759 | GGCAAGTCCCTGTACTACTATATCC | | |
| PLXNB2 | 208890_s_at | 760 | CGCCCAGCGTCTAGACTGTAGCATC | cgcccagcgtctagactgtagcatcttcctctgagcaataccgccgggcaccg | BC004542.1 |
| | | | | caccagcaccagccccagccccagctccctccggccgcagaaccagcatcggg | |
| | | | | tgttcactgtcgagtctcgagtgatttgaaaatgtgccttacgctgccacgct | |
| | | | | gggggcagctggcctccgcctccgcccacgcaccagcagccgcctccatgccc | |
| | | | | taggttgggcccctgggggatctgagggcctgtggcccccagggcaagttccc | |
| | | | | agatcctatgtctgtctgtccaccacgagatgggaggaggagaaaaagcggta | |
| | | | | cgatgccttcctgacctcaccggcctccccaagggtgccggcactctgggtgg | |
| | | | | actcacggctgctgggccccacgtcaaaggtcaagtgagacgtaggtcaagtc | |
| | | | | ctacgtcggggcccagacatcctggggtcctggtctgtcagacaggctgccct | |
| | | | | agagccccacccagtccggggggactgggagcagttccaagaccaccc | |
| | | 761 | GAACCAGCATCGGGTGTTCACTGTC | | |
| | | 762 | GTGTTCACTGTCGAGTCTCGAGTGA | | |
| | | 763 | TACGCTGCCACGCTGGGGGCAGCTG | | |
| | | 764 | CCAGGGCAAGTTCCCAGATCCTATG | | |
| | | 765 | TCCCAGATCCTATGTCTGTCTGTCC | | |
| | | 766 | AGAAAAAGCGGTACGATGCCTTCCT | | |
| | | 767 | GGCCCCACGTCAAAGGTCAAGTGAG | | |
| | | 768 | TCTGTCAGACAGGCTGCCCTAGAGC | | |
| | | 769 | TCCGGGGGGACTGGGAGCAGTTCCA | | |
| | | 770 | ACTGGGAGCAGTTCCAAGACCACCC | | |
| CYFIP1 | 208923_at | 771 | GCACTCCGTAACTCAACATGGCATG | gcactccgtaactcaacatggcatgcctttctctccgtaaactatttagtgag | BC005097.1 |
| | | | | atttttagggactatttttcagtatctctgtacctgttaaagggggtgctttt | |
| | | | | cgatctaaaaacttaattttataaaattgacttatttttctagactaaaattg | |
| | | | | tatatgcttttggtaattaggaactcttgagaatattggctgctgattgttgc | |
| | | | | catcacgttcctacaaaattgtttttctatgggatgttctggcagctgtgtca | |
| | | | | taaaatgctgctgggttcattcattcattccataagaaacttaataccagcaa | |
| | | | | atgcattaaatcccttgccagttaccattaactataactatttagcttttgtt | |
| | | | | tagggatctttctgatggtcttttatgagcaatcttagttctaagtcattgtt | |
| | | | | cccatcccttttttgtgtgtttcagaaaatagtgaacttgattcccctgcttccacta | |
| | | | | aatccagttgtga | |
| | | 772 | GCCTTTCTCTCCGTAAACTATTTAG | | |
| | | 773 | TTTTCAGTATCTCTGTACCTGTTAA | | |
| | | 774 | GAGAATATTGGCTGCTGATTGTTGC | | |
| | | 775 | TTGTTGCCATCACGTTCCTACAAAA | | |
| | | 776 | TGGGATGTTCTGGCAGCTGTGTCAT | | |
| | | 777 | ATGCTGCTGGGTTCATTCATTCATT | | |
| | | 778 | GTTTAGGGATCTTTCTGATGGTCTT | | |
| | | 779 | CTTAGTTCTAAGTCATTGTTCCCAT | | |
| | | 780 | AATAGTGAACTTGATTCCCCTGCTT | | |
| | | 781 | CTGCTTCCACTAAATCCAGTTGTGA | | |
| MAGED1 | 209014_at | 782 | GGACTGCACAGTTCATGGAGGCTGC | ggactgcacagttcatggaggctgcagatgaggccttggatgctctggatgct | AF217963.1 |
| | | | | gctgcagctgaggccgaagcccgggctgaagcaagaacccgcatgggaattgg | |
| | | | | agatgaggctgtgtctgggccctggagctgggatgacattgagtttgagctgc | |
| | | | | tgacctgggatgaggaaggagattttggagatccctggtccagaattccattt | |
| | | | | accttctgggccagataccaccagaatgcccgctccagattccctcagacctt | |
| | | | | tgccggtcccattattggtcctggtggtacagccagtgccaacttcgctgcca | |
| | | | | actttggtgccattggtttcttctgggttgagtgagatgttggatattgctat | |
| | | | | caatcgcagtagtctttcccctgtgtgagctgaagcctcagattccttctaaa | |
| | | | | cacagctatctagagagccacatcctgttgactgaaagtggcatgcaagataa | |
| | | | | atttatttgctgttccttgtctactgctttttttccccttgtgtgctgtcaagt | |
| | | 783 | ATGAGGCCTTGGATGCTCTGGATGC | | |
| | | 784 | TGGAGATCCCTGGTCCAGAATTCCA | | |
| | | 785 | TTCCATTTACCTTCTGGGCCAGATA | | |
| | | 786 | GGTCCCATTATTGGTCCTGGTGGTA | | |
| | | 787 | CCAACTTCGCTGCCAACTTTGGTGC | | |
| | | 788 | GTGCCATTGGTTTCTTCTGGGTTGA | | |
| | | 789 | TCCCCTGTGTGAGCTGAAGCCTCAG | | |
| | | 790 | CTATCTAGAGAGCCACATCCTGTTG | | |
| | | 791 | ATTTATTTGCTGTTCCTTGTCTACT | | |
| | | 792 | TTTTTCCCCTTGTGTGCTGTCAAGT | | |
| SYNE1 | 209447_at | 793 | GAGGACCTTGATCTTGGCGAAAGCC | gaggaccttgatcttggcgaaagccatcggtgtggcagctttagccctcctcc | AF043290.1 |
| | | | | agatcacatgtgtgcaaattatggcttcagagggtggaagataaacagtgacg | |
| | | | | ggggaacaaacagacaacaagaaggtttggaagaaatctggtttgagactctg | |
| | | | | aaccttagcactaaggagattgagtaaggacctccaaagttccccggactcat | |
| | | | | gaattctgggcccttggcattcgtgtgcacagccaaggacttcagtagaccat | |
| | | | | ctgggcagctttcccatggtgctgctccaaccatcagataaatgaccctcccc | |
| | | | | aagcaccatgtcagtgtcgtacaatctaccaaccaaccagtgctgaagagatt | |
| | | | | ttagaaccttgtaacatacaatttttaagagcttatatggcagcttcctttt | |
| | | 794 | GCCATCGGTGTGGCAGCTTTAGCCC | | |
| | | 795 | TTGAGACTCTGAACCTTAGCACTAA | | |
| | | 796 | AAAGTTCCCCGGACTCATGAATTCT | | |
| | | 797 | CCCTTGGCATTCGTGTGCACAGCCA | | |
| | | 798 | GCACAGCCAAGGACTTCAGTAGACC | | |
| | | 799 | TCAGTAGACCATCTGGGCAGCTTTC | | |
| | | 800 | AACCATCAGATAAATGACCCTCCCC | | |
| | | 801 | GCACCATGTCAGTGTCGTACAATCT | | |
| | | 802 | GTGTCGTACAATCTACCAACCAACC | | |
| | | 803 | AGAGCTTATATGGCAGCTTCCTTTT | | |
| CBLB | 209682_at | 804 | GGAGACCGATGCTTGCTCAGGATGT | ggagaccgatgcttgctcaggatgtcgacagctgtggcttccttgtttttgct | U26710.1 |
| | | | | agccatatttttaaatcagggttgaactgacaaaaataatttaaagacgttta | |
| | | | | cttcccttgaactttgaacctgtgaaatgctttaccttgtttacaatttggca | |
| | | | | aagttgcagtttgttcttgtttttagtttagttttgttttggtgttttgatac | |
| | | | | ctgtactgtgttcttcacagaccctttgtagcgtggtcaggtctgctgtaaca | |
| | | | | tttcccaccaactctcttgctgtccacatcaacagctaaatcatttattcata | |
| | | | | tggatctctaccatccccatgccttgcccaggtccagttccatttctctcatt | |
| | | | | cacaagatgctttgaaggttctgattttcaactgatcaaactaatgcaaaaaa | |
| | | | | aaaaagtatgtattcttcactactgagtttcttctttggaaaccatcactatt | |
| | | 805 | CCTTGTTTTTGCTAGCCATATTTTT | | |
| | | 806 | GAACCTGTGAAATGCTTTACCTTGT | | |
| | | 807 | GGCAAAGTTGCAGTTTGTTCTTGTT | | |
| | | 808 | GTACTGTGTTCTTCACAGACCCTTT | | |
| | | 809 | CTTCACAGACCCTTTGTAGCGTGGT | | |
| | | 810 | GTAGCGTGGTCAGGTCTGCTGTAAC | | |
| | | 811 | GTTCCATTTCTCTCATTCACAAGAT | | |
| | | 812 | GAAGGTTCTGATTTTCAACTGATCA | | |
| | | 813 | TTCTTCACTACTGAGTTTCTTCTTT | | |
| | | 814 | TTCTTCTTTGGAAACCATCACTATT | | |
| CD247 | 210031_at | 815 | ACTGTACTGGGCCATGTTGTGCCTC | aagcgcagatgctagcacatgccctaatgtctgtatcactctgtgtctgagtg | J04132.1 |
| | | | | gcttcactcctgctgtaaatttggcttctgttgtcaccttcacctcctttcaa | |
| | | | | ggtaactgtactgggccatgttgtgcctccctggtgagagggccgggcagagg | |
| | | | | ggcagatggaaaggagcctaggccaggtgcaaccagggagctgcaggggcatg | |
| | | | | ggaaggtgggcgggcaggggagggtcagccagggcctgcgagggcagcgggag | |
| | | | | cctccctgcctcaggcctctgtgccgcaccattgaactgtaccatgtgctaca | |
| | | | | ggggccagaagatgaacagactgaccttgatgagctgtgcacaaagtggcata | |
| | | | | aaaaacagtgtggttacacagtgtgaataaagtgctgcggagcaagaggaggc | |
| | | | | cgttgattcacttcacgctttcagcgaatgacaaaatcatctttgtgaaggcctcgca | |
| | | | | ggaagacgcaacacatgggacctat | |
| | | 816 | AAAGGAGCCTAGGCCAGGTGCAACC | | |
| | | 817 | TGCCGCACCATTGAACTGTACCATG | | |
| | | 818 | GACTGACCTTGATGAGCTGTGCACA | | |
| | | 819 | TGATTCACTTCACGCTTTCAGCGAA | | |
| | | 820 | ATCATCTTTGTGAAGGCCTCGCAGG | | |
| | | 821 | GGAAGACGCAACACATGGGACCTAT | | |
| | | 822 | AAGCGCAGATGCTAGCACATGCCCT | | |
| | | 823 | AATGTCTGTATCACTCTGTGTCTGA | | |
| | | 824 | GGCTTCACTCCTGCTGTAAATTTGG | | |
| | | 825 | AAATTTGGCTTCTGTTGTCACCTTC | | |
| PRKCQ | 210038_at | 826 | AATCCATTCATCCTGATTGGGCATG | aatccattcatcctgattgggcatgaaatccatggtcaagaggacaagtggaa | AL137145 |
| | | | | agtgagagggaaggtttgctagacaccttcgcttgttatcttgtcaagataga | |
| | | | | aaagatagtatcatttcacccttgccagtaaaaacctttccatccacccattc | |
| | | | | tcagcagactccagtattggcacagtcactcactgccattctcacactataac | |
| | | | | aagaaaagaaatgaagtgcataagtctcctgggaaaagaaccttaaccccttc | |
| | | | | tcgtgccatgactggtgatttcatgactcataagcccctccgtaggcatcattcaaga | |
| | | | | tcaatggcccatgcatgctgtttgcagca | |
| | | 827 | GACACCTTCGCTTGTTATCTTGTCA | | |
| | | 828 | ATCATTTCACCCTTGCCAGTAAAAA | | |
| | | 829 | CCATTCTCAGCAGACTCCAGTATTG | | |
| | | 830 | CCAGTATTGGCACAGTCACTCACTG | | |
| | | 831 | ACTGCCATTCTCACACTATAACAAG | | |
| | | 832 | GAAGTGCATAAGTCTCCTGGGAAAA | | |
| | | 833 | CCTTCTCGTGCCATGACTGGTGATT | | |
| | | 834 | TGATTTCATGACTCATAAGCCCCTC | | |
| | | 835 | CCCCTCCGTAGGCATCATTCAAGAT | | |
| | | 836 | TGGCCCATGCATGCTGTTTGCAGCA | | |
| FYN | 210105_s_at | 837 | GGCCCGGGTCTGCGGAGAGAGGCCT | ggcccgggtctgcggagagaggccttgtcccagaggctgccccacccctcccc | M14333.1 |
| | | | | attagctttcaattccgtagccagctgctccccagcagcggaaccgcccagga | |
| | | | | tcagattgcatgtgactctgaagctgacgaacttccatggccctcattaatga | |
| | | | | cacttgtccccaaatccgaacctcctctgtgaagcattcgagacagaaccttg | |
| | | | | ttatttctcagactttggaaaatgcattgtatcgatgttatgtaaaaggccaa | |
| | | | | acctctgttcagtgtaaatagttactccagtgccaacaatcctagtgctttcc | |
| | | | | ttttttaaaaatgcaaatcctatgtgattttaactctgtcttcacctgattca | |
| | | | | actaaaaaaaaaaagtattattttccaaaagtggcctctttgtctaa | |
| | | 838 | AGCTTTCAATTCCGTAGCCAGCTGC | | |
| | | 839 | AACCGCCCAGGATCAGATTGCATGT | | |
| | | 840 | GATTGCATGTGACTCTGAAGCTGAC | | |
| | | 841 | CTTCCATGGCCCTCATTAATGACAC | | |
| | | 842 | TAATGACACTTGTCCCCAAATCCGA | | |
| | | 843 | GACAGAACCTTGTTATTTCTCAGAC | | |
| | | 844 | AAAGGCCAAACCTCTGTTCAGTGTA | | |
| | | 845 | TCCAGTGCCAACAATCCTAGTGCTT | | |
| | | 846 | CCTATGTGATTTTAACTCTGTCTTC | | |
| | | 847 | TTCCAAAAGTGGCCTCTTTGTCTAA | | |
| LILRB4 | 210152_at | 848 | AGGACGGGGTGGAAATGGACACTCG | ccaacactggcgtcagggaaaacacaggacattggcccagagacaggctgatt | U82979.1 |
| | | | | tccaacgtcctccaggggctgccgagccagagcccaaggacgggggcctacag | |
| | | | | aggaggtccagcccagctgctgacgtccagggagaaaacttctgtgctgccgt | |
| | | | | gaagaacacacagcctgaggacggggtggaaatggacactcggagcccacacg | |
| | | | | atgaagacccccaggcagtgacgtatgccaaggtgaaacactccagacctagg | |
| | | | | agagaaatggcctctcctccctccccactgtctggggaattcctggacacaaa | |
| | | | | ggacagacaggcagaagaggacagacagatggacactgaggctgctgcatctg | |
| | | | | aagccccccaggatgtgacctacgcccagctgcacagctttaccctcagacagaagg | |
| | | | | caactg | |
| | | 849 | CACAGCTTTACCCTCAGACAGAAGG | | |
| | | 850 | TTTACCCTCAGACAGAAGGCAACTG | | |
| | | 851 | CCAACACTGGCGTCAGGGAAAACAC | | |
| | | 852 | GGAAAACACAGGACATTGGCCCAGA | | |
| | | 853 | ATTGGCCCAGAGACAGGCTGATTTC | | |
| | | 854 | GAGACAGGCTGATTTCCAACGTCCT | | |
| | | 855 | GAGCCCAAGGACGGGGGCCTACAGA | | |
| | | 856 | GCTGACGTCCAGGGAGAAAACTTCT | | |
| | | 857 | AAACTTCTGTGCTGCCGTGAAGAAC | | |
| | | 858 | TCTGTGCTGCCGTGAAGAACACACA | | |
| GZMB | 210164_at | 859 | GCCAAGCGGACCAGAGCTGTGCAGC | gccaagcggaccagagctgtgcagcccctcaggctacctagcaacaaggccca | J03189.1 |
| | | | | ggtgaagccagggcagacatgcagtgtggccggctgggggcagacggcccccc | |
| | | | | tgggaaaacattcacacacactacaagaggtgaagatgacagtgcaggaagat | |
| | | | | cgaaagtgcgaatctgacttacgccattattacgacagtaccattgagttgtg | |
| | | | | cgtgggggacccagagattaaaaagacttcctttaagggggactctggaggcc | |
| | | | | ctcttgtgtgtaacaaggtggcccagggcattgtctcctatggacgaaacaat | |
| | | | | ggcatgcctccacgagcctgcaccaaagtctcaagctttgtacactggataaa | |
| | | | | gaaaaccatgaaacgctactaactacaggaagcaaactaagcccccgctgtaatgaa | |
| | | | | acaccttctctggagcca | |
| | | 860 | TGCGAATCTGACTTACGCCATTATT | | |
| | | 861 | GACTTACGCCATTATTACGACAGTA | | |
| | | 862 | ACGACAGTACCATTGAGTTGTGCGT | | |
| | | 863 | TTGAGTTGTGCGTGGGGGACCCAGA | | |
| | | 864 | ACTCTGGAGGCCCTCTTGTGTGTAA | | |
| | | 865 | GCATTGTCTCCTATGGACGAAACAA | | |
| | | 866 | AAGTCTCAAGCTTTGTACACTGGAT | | |
| | | 867 | TACAGGAAGCAAACTAAGCCCCCGC | | |
| | | 868 | CTAAGCCCCCGCTGTAATGAAACAC | | |
| | | 869 | TAATGAAACACCTTCTCTGGAGCCA | | |
| ANXA2 | 210427_x_at | 870 | CTGATCAGAATCATGGTCTCCCGCA | gaaaatgctttcctgaacctggttcagtgcattcagaacaagcccctgtattt | BC001388.1 |
| | | | | tgctgatcggctgtatgactccatgaagggcaaggggacgcgagataaggtcc | |
| | | | | tgatcagaatcatggtctcccgcagtgaagtggacatgttgaaaattaggtct | |
| | | | | gaattcaagagaaagtacggcaagtccctgtactattatatccagcaagacac | |
| | | | | taagggcgactaccagaaagcgctgctgtacctgtgtggtggagatgactgaa | |
| | | | | gcccgacacggcctgagcgtccagaaatggtgctcaccatgcttccagctaac | |
| | | | | aggtctagaaaaccagcttgcgaataacagtccccgtggccatccctgtgagg | |
| | | | | gtgacgttagcattacccccaacctcattttagttgcctaagcattgcctggc | |
| | | | | cttcctgtctagtctctcctgtaagccaaagaaatgaacattccaaggagttg | |
| | | | | gaagtgaagtctatgatgtgaaacactttgcctcctgtgtactgtgtcataaa | |
| | | 871 | CAGAAAGCGCTGCTGTACCTGTGTG | | |
| | | 872 | CTCACCATGCTTCCAGCTAACAGGT | | |
| | | 873 | ACCAGCTTGCGAATAACAGTCCCCG | | |
| | | 874 | CGTGGCCATCCCTGTGAGGGTGACG | | |
| | | 875 | GAGGGTGACGTTAGCATTACCCCCA | | |
| | | 876 | AGTTGCCTAAGCATTGCCTGGCCTT | | |
| | | 877 | TGCCTCCTGTGTACTGTGTCATAAA | | |
| | | 878 | GAAAATGCTTTCCTGAACCTGGTTC | | |
| | | 879 | CAAGCCCCTGTATTTTGCTGATCGG | | |
| | | 880 | GCTGATCGGCTGTATGACTCCATGA | | |
| NFATC3 | 210555_s_at | 881 | TCTGCACCTTCATCCTTAATATGTC | tctgcaccttcatccttaatatgtcacagtttgtgtgatccagcgtcatttcc | U85430.1 |
| | | | | acctgatggggcaactgtgagcattaaacctgaaccagaagatcgagagccta | |
| | | | | actttgcaaccattggtctgcaggacatcactttagat | |
| | | 882 | CATCCTTAATATGTCACAGTTTGTG | | |
| | | 883 | ACAGTTTGTGTGATCCAGCGTCATT | | |
| | | 884 | TTGTGTGATCCAGCGTCATTTCCAC | | |
| | | 885 | GTCATTTCCACCTGATGGGGCAACT | | |
| | | 886 | GGGGCAACTGTGAGCATTAAACCTG | | |
| | | 887 | ACCTGAACCAGAAGATCGAGAGCCT | | |
| | | 888 | GATCGAGAGCCTAACTTTGCAACCA | | |
| | | 889 | GAGCCTAACTTTGCAACCATTGGTC | | |
| | | 890 | CAACCATTGGTCTGCAGGACATCAC | | |
| | | 891 | TGGTCTGCAGGACATCACTTTAGAT | | |
| KLRD1 | 210606_x_at | 892 | GAAAGACTCTGACTGCTGTTCTTGC | gaaagactctgactgctgttcttgccaagaaaaatgggttgggtaccggtgca | U30610.1 |
| | | | | actgttacttcatttccagtgaacagaaaacttggaacgaaagtcggcatctc | |
| | | | | tgtgcttctcagaaatccagcctgcttcagcttcaaaacacagatgaactgga | |
| | | | | ttttatgagctccagtcaacaattttactggattggactctcttacagtgagg | |
| | | | | agcacaccgcctggttgtgggagaatggctctgcactctcccagtatctattt | |
| | | | | ccatcatttgaaacttttaatacaaagaactgcatagcgtataatccaaatgg | |
| | | | | aaatgctttagatgaatcctgtgaagataaaaatcgttatatctgtaagcaac | |
| | | | | agctcatttaaatgtttcttggggcagagaaggtggagagtaaagacccaaca | |
| | | | | ttactaacaatgatacagttgcatgttatattattactaattgtctacttctggagt | |
| | | | | cta | |
| | | 893 | GTACCGGTGCAACTGTTACTTCATT | | |
| | | 894 | ACGAAAGTCGGCATCTCTGTGCTTC | | |
| | | 895 | CTGTGCTTCTCAGAAATCCAGCCTG | | |
| | | 896 | CAGCCTGCTTCAGCTTCAAAACACA | | |
| | | 897 | TTTTACTGGATTGGACTCTCTTACA | | |
| | | 898 | CTTACAGTGAGGAGCACACCGCCTG | | |
| | | 899 | GCACACCGCCTGGTTGTGGGAGAAT | | |
| | | 900 | GTGGGAGAATGGCTCTGCACTCTCC | | |
| | | 901 | TCCCAGTATCTATTTCCATCATTTG | | |
| | | 902 | ACTAATTGTCTACTTCTGGAGTCTA | | |
| PMS2L11 | 210707_x_at | 903 | GAAGTCAGTCCATCAGATTTGCTCT | ctggaccctatcgtacagaacctgctaaggccatcaaacctattgatcggaag | U38980.1 |
| | | | | tcagtccatcagatttgctctgggccagtggtactgagtctaagcactgcagt | |
| | | | | gaaggagttagtagaaaacagtctggatgctggtgccactaatattgatctaa | |
| | | | | agcttaaggactatggaatggatctcattgaagtttcaggcaatggatgtggg | |
| | | | | gtagaagaagaaaacttcgaaggcttaatgatgtcaccatttctacctgccac | |
| | | | | gtctcggcgaaggttgggactcgactggtgtttgatcacgatgggaaaatcat | |
| | | | | ccagaagaccccctacccccaccccagagggaccacagtcagcgtgaagcagt | |
| | | | | tattttctacgctacctgtgcgccataaggaatttcaaaggaatattaagaagaaac | |
| | | | | atgctgcttccccttc | |
| | | 904 | GCTCTGGGCCAGTGGTACTGAGTCT | | |
| | | 905 | AACAGTCTGGATGCTGGTGCCACTA | | |
| | | 906 | TAATGATGTCACCATTTCTACCTGC | | |
| | | 907 | GCCACGTCTCGGCGAAGGTTGGGAC | | |
| | | 908 | GTTGGGACTCGACTGGTGTTTGATC | | |
| | | 909 | GAGGGACCACAGTCAGCGTGAAGCA | | |
| | | 910 | CTACGCTACCTGTGCGCCATAAGGA | | |
| | | 911 | AGAAGAAACATGCTGCTTCCCCTTC | | |
| | | 912 | CTGGACCCTATCGTACAGAACCTGC | | |
| | | 913 | GAACCTGCTAAGGCCATCAAACCTA | | |
| HOP | 211597_s_at | 914 | AAGCTATGTGTATCTTCTGTGTAAA | aagctatgtgtatcttctgtgtaaagcagtggcttcactggaaaaatggtgtg | AB059408.1 |
| | | | | gctagcatttccctttgagtcatgatgacagatggtgtgaaaaccatctaagt | |
| | | | | ttgcttttgaccatcacctcccagtagcaatttgctttcataatccatttagc | |
| | | | | aatccaggcctctgttgaaaagataatatgagggagaagggaacacatttcct | |
| | | | | tctgaacttacttccctaagtcactttccttatgtatcatctaatacaatgat | |
| | | | | ggttgagtgaaaatacagaaggggtgtttgagtattcagatttcataaaacac | |
| | | | | ttccttggaatatagctgcattaacttggaaagaagcctgttgggccagaagacaga | |
| | | 915 | AATGGTGTGGCTAGCATTTCCCTTT | | |
| | | 916 | TAAGTTTGCTTTTGACCATCACCTC | | |
| | | 917 | TCACCTCCCAGTAGCAATTTGCTTT | | |
| | | 918 | TAATCCATTTAGCAATCCAGGCCTC | | |
| | | 919 | GCAATCCAGGCCTCTGTTGAAAAGA | | |
| | | 920 | GAAGGGAACACATTTCCTTCTGAAC | | |
| | | 921 | CTTCCCTAAGTCACTTTCCTTATGT | | |
| | | 922 | AGTCACTTTCCTTATGTATCATCTA | | |
| | | 923 | ACTTCCTTGGAATATAGCTGCATTA | | |
| | | 924 | GAAGCCTGTTGGGCCAGAAGACAGA | | |
| NCALD | 211685_s_at | 925 | TGGGTGAGGAGACCTAGCATGCCCT | tgggtgaggagacctagcatgccctattggcagtgctcaggagctgcatccca | AF251061.1 |
| | | | | cttttccctgctctgaatcgaagtcctagttccttcctttgattctcctttgg | |
| | | | | taggtggaatcagttaatgttttgagaaacctgcctgggctctgcccttagtc | |
| | | | | atgacatctcgctgagccagacccactctgttccttggaacctagagctggag | |
| | | | | tgaggagtagaggtctccggctattccagaaagaaaagtgagccacatgcagg | |
| | | | | ctgatgaatgccgacacttccagaatgtatagaaatagtccctgtcctggcct | |
| | | | | gccactgaccctgtctgtattttctcggaggttgtttttctccttctccttcc | |
| | | | | caggaaggtctttgtatgtcgaatccagtgcactcaagtttggccaagggact | |
| | | | | ccacagcacccagaagactgcatgcctcaaggtttatgtcactcctctgctgggctg | |
| | | | | ttcattgtcattgc | |
| | | 926 | AGCATGCCCTATTGGCAGTGCTCAG | | |
| | | 927 | TCCCTGCTCTGAATCGAAGTCCTAG | | |
| | | 928 | TTAGTCATGACATCTCGCTGAGCCA | | |
| | | 929 | GGAGTAGAGGTCTCCGGCTATTCCA | | |
| | | 930 | GAATGCCGACACTTCCAGAATGTAT | | |
| | | 931 | ACCCTGTCTGTATTTTCTCGGAGGT | | |
| | | 932 | TCTCGGAGGTTGTTTTTCTCCTTCT | | |
| | | 933 | GTATGTCGAATCCAGTGCACTCAAG | | |
| | | 934 | GCCTCAAGGTTTATGTCACTCCTCT | | |
| | | 935 | CTGCTGGGCTGTTCATTGTCATTGC | | |
| LOC130074 | 212017_at | 936 | GGATGAGCGGCGTCTGTGTAGGGAC | ggatgagcggcgtctgtgtagggacccccccccgggcctgcagaagggtggtg | BF677404 |
| | | | | tgctcccaggactggcatgacaggtgtctcctcctcaccacaggctgtgccca | |
| | | | | tgngtccctgtgcagaccagtgggcaaggcagctgggccagatctcaggccag | |
| | | | | ccgtttgtgctcctagcagggttgctgtgctggccacacggagaggccctaga | |
| | | | | gagcctcatggattgtaactaaagaagaaacggttcctttttgntttttttaa | |
| | | | | aaatgatttttaaataccgttttttacaccgttctctcggtactttttttaag | |
| | | | | ctaagtcagcattgtcttccagtgttaaaggcatccctcacctctgcattgaa | |
| | | | | cttacgtatccatgccaaggaatggaatttccatcctgagccagttcagttaggtgt | |
| | | | | caatt | |
| | | 937 | TGCAGAAGGGTGGTGTGCTCCCAGG | | |
| | | 938 | GGACTGGCATGACAGGTGTCTCCTC | | |
| | | 939 | TCCCTGTGCAGACCAGTGGGCAAGG | | |
| | | 940 | TGTGCTCCTAGCAGGGTTGCTGTGC | | |
| | | 941 | CACACGGAGAGGCCCTAGAGAGCCT | | |
| | | 942 | GAGAGCCTCATGGATTGTAACTAAA | | |
| | | 943 | CCAGTGTTAAAGGCATCCCTCACCT | | |
| | | 944 | CTCACCTCTGCATTGAACTTACGTA | | |
| | | 945 | GAACTTACGTATCCATGCCAAGGAA | | |
| | | 946 | GAGCCAGTTCAGTTAGGTGTCAATT | | |
| GPR56 | 212070_at | 947 | TCCAAGGACTGAGACTGACCTCCTC | tccaaggactgagactgacctcctctggtgacactggcctagngcctgacact | AL554008 |
| | | | | ctcctaagaggttctctccaagcccccaaatagctccaggcgccctcggccgc | |
| | | | | ccatcatggttaattctgtccaacaaacacacacgggtagattgctggcctgt | |
| | | | | tgtaggtggtagggacacagatgaccgacctggtcactcctcctgccaacatt | |
| | | | | cagtctggtatgtgaggcgtgcgtgaagcaagaactcctggagctacagggac | |
| | | | | agggagccatcattcctgcctgggaatcctggaagacttcctgcaggagtcag | |
| | | | | cgttcaatcttgaccttgaagatgggaaggatgttctttttacgtaccaattct | |
| | | 948 | ACACTCTCCTAAGAGGTTCTCTCCA | | |
| | | 949 | GGCCGCCCATCATGGTTAATTCTGT | | |
| | | 950 | CACACGGGTAGATTGCTGGCCTGTT | | |
| | | 951 | TAGGGACACAGATGACCGACCTGGT | | |
| | | 952 | CAGTCTGGTATGTGAGGCGTGCGTG | | |
| | | 953 | AGGCGTGCGTGAAGCAAGAACTCCT | | |
| | | 954 | AGGGACAGGGAGCCATCATTCCTGC | | |
| | | 955 | ACTTCCTGCAGGAGTCAGCGTTCAA | | |
| | | 956 | GTCAGCGTTCAATCTTGACCTTGAA | | |
| | | 957 | GATGTTCTTTTTACGTACCAATTCT | | |
| SPTBN1 | 212071_s_at | 958 | AAACCATTTGTATCTGGCATCACTT | aaaccatttgtatctggcatcacttactaacacacgacatgcggcttttctgc | BE968833 |
| | | | | atcaactgctatgacggttaagaatgtcagtatacaagaaggaatagaaaact | |
| | | | | gatactgttttaaataatctgtaatttcaatttttttttttttttngctgaaa | |
| | | | | tacattatattgtacgtttgagataattctagntacaaagtataataaaacta | |
| | | | | gatngtataataaaccctttaaatcattggtaagtgtacaagtggtggnaact | |
| | | | | gaagcatttactggnacaaagtaatgttnactctaatggttacttgctcgtgc | |
| | | | | gttgnnccacactgtgttataatttgcttcatttccttgctatttgatacata | |
| | | | | gtgtgcatttctctgtcactgtaactattgtaatgacaaattttcatcttact | |
| | | | | gcacaatcaaaatgacattgataggaatgaactccagaggctgggcctgaaca | |
| | | | | gggaggtggtcgctcaggcctggtgctcagtcgtacgacctgtacct | |
| | | 959 | TCTGGCATCACTTACTAACACACGA | | |
| | | 960 | TAACACACGACATGCGGCTTTTCTG | | |
| | | 961 | ACATGCGGCTTTTCTGCATCAACTG | | |
| | | 962 | TCTAATGGTTACTTGCTCGTGCGTT | | |
| | | 963 | TAATTTGCTTCATTTCCTTGCTATT | | |
| | | 964 | TGCATTTCTCTGTCACTGTAACTAT | | |
| | | 965 | AATTTTCATCTTACTGCACAATCAA | | |
| | | 966 | TAGGAATGAACTCCAGAGGCTGGGC | | |
| | | 967 | GAGGCTGGGCCTGAACAGGGAGGTG | | |
| | | 968 | GTGCTCAGTCGTACGACCTGTACCT | | |
| ATP2B4 | 212135_s_at | 969 | GTGGAAAAGCCTCTAAATGCATCCC | gtggaaaagcctctaaatgcatcccttcctttctttcctgcttcctttgcctt | AW517686 |
| | | | | acaattgaagcagcccgtggtaccatcacagtatgcagagacttcctcacctt | |
| | | | | tcatatctagggaccacccccgatgcattggtgagggtgggcacttataaatg | |
| | | | | cctgctattgttaagccattccagcctcttcctctgaatagaccagacgccctttca | |
| | | | | cttagttcagtgcca | |
| | | 970 | TGCTTCCTTTGCCTTACAATTGAAG | | |
| | | 971 | CAATTGAAGCAGCCCGTGGTACCAT | | |
| | | 972 | CAGTATGCAGAGACTTCCTCACCTT | | |
| | | 973 | CACCTTTCATATCTAGGGACCACCC | | |
| | | 974 | ACCACCCCCGATGCATTGGTGAGGG | | |
| | | 975 | GGTGGGCACTTATAAATGCCTGCTA | | |
| | | 976 | GCCTGCTATTGTTAAGCCATTCCAG | | |
| | | 977 | CAGCCTCTTCCTCTGAATAGACCAG | | |
| | | 978 | TCTGAATAGACCAGACGCCCTTTCA | | |
| | | 979 | CGCCCTTTCACTTAGTTCAGTGCCA | | |
| GTF3C2 | 212429_s_at | 980 | GTATCTGCATGAAGGCTCCTGTCTG | gtatctgcatgaaggctcctgtctgactattccaggatccaatattactgcct | AW194657 |
| | | | | tctgaaacttcctctttagggtaaccatcatgtatgcccacgagggtgatagt | |
| | | | | aattcgtgagactgaagttgcttagagtacttctttgaccaaggaataccaca | |
| | | | | gacaccctaccgatagaacagtggctcagatcttacttgctcctgcttacgaa | |
| | | | | gtattcccaatcactggtcatctgaccctacttgaacactcctgaacagtcat | |
| | | | | gttttttaaaatcttcctttatatcaagtcagagagtatacttctataaattt | |
| | | | | cactcatggatgttaggaaatctagtcatcttccctgtgattgccctgttaagtattt | |
| | | | | aaccatagctatcatgtgtttccca | |
| | | 981 | GGCTCCTGTCTGACTATTCCAGGAT | | |
| | | 982 | TATTACTGCCTTCTGAAACTTCCTC | | |
| | | 983 | TAACCATCATGTATGCCCACGAGGG | | |
| | | 984 | CAAGGAATACCACAGACACCCTACC | | |
| | | 985 | CCCTACCGATAGAACAGTGGCTCAG | | |
| | | 986 | TGCTCCTGCTTACGAAGTATTCCCA | | |
| | | 987 | TTCCCAATCACTGGTCATCTGACCC | | |
| | | 988 | GGAAATCTAGTCATCTTCCCTGTGA | | |
| | | 989 | TCCCTGTGATTGCCCTGTTAAGTAT | | |
| | | 990 | AACCATAGCTATCATGTGTTTCCCA | | |
| AUTS2 | 212599_at | 991 | TCAGACACACACAGGTCGCCAGTGA | tcagacacacacaggtcgccagtgacttcacacacacctcatgtgagaaccat | AK025298.1 |
| | | | | gccttttttagtgtgtcctatttcatacctgtacacacttcctcgttttgtaa | |
| | | | | tgagatttacttacacccaaacagatcctgaaagaaagcttcaagttttctca | |
| | | | | gatgatggatatgttttcactgtattcaataactgacggatgtaaggtgcacg | |
| | | | | tttcctgatgnntgacgcactgtattccagctggtgatcaagtctgggaacag | |
| | | | | ccgtaacaggtcaaccttgtggagccatcgcgagttagagggtgaaagatggc | |
| | | | | agaaaaaaaagtcttgtgtgtgagtgtgttttttgagtttgcatcaatcttaatgtct | |
| | | | | cttcataatacttttataatacattaagcctcttgtctacat | |
| | | 992 | TAGTGTGTCCTATTTCATACCTGTA | | |
| | | 993 | TGTACACACTTCCTCGTTTTGTAAT | | |
| | | 994 | TACTTACACCCAAACAGATCCTGAA | | |
| | | 995 | GGATGTAAGGTGCACGTTTCCTGAT | | |
| | | 996 | GACGCACTGTATTCCAGCTGGTGAT | | |
| | | 997 | GGTGATCAAGTCTGGGAACAGCCGT | | |
| | | 998 | GAACAGCCGTAACAGGTCAACCTTG | | |
| | | 999 | CAACCTTGTGGAGCCATCGCGAGTT | | |
| | | 1000 | GCATCAATCTTAATGTCTCTTCATA | | |
| | | 1001 | AATACATTAAGCCTCTTGTCTACAT | | |
| STX10 | 212625_at | 1002 | AGCTGGAGAGTAGAGGGTCCCGCCT | ccaggttctgaagcacatgtccggccgcgttggagaagagctggacgagcagg | NM_003765.1 |
| | | | | gcatcatgctggatgccttcgcccaagagatggaccacacccagtcccgcatg | |
| | | | | gacggggtcctcaggaagttggccaaagtatcccacatgacgagtgaccgccg | |
| | | | | acagtggtgtgccatcgccgtgctagtgggggtgcttctcctcgttctcatct | |
| | | | | tactattctctctctgaccccagccctccctggcaggctggtcccttaagcct | |
| | | | | ggggagccaccaagcactttggagctggcctcgccccctaggaggagagggtc | |
| | | | | cctcctgggtagctggagagtagagggtcccgcctggggagctgtccccatgg | |
| | | | | ctctcccctagagccagtgggacccttcaggaccctgggctggaaccaccacc | |
| | | | | actggtcctgtctcaagtgcacttagggggtggtggaggcagggacacctgagacac | |
| | | | | acctgtctccat | |
| | | 1003 | TGGTCCTGTCTCAAGTGCACTTAGG | | |
| | | 1004 | ACACCTGAGACACACCTGTCTCCAT | | |
| | | 1005 | CCAGGTTCTGAAGCACATGTCCGGC | | |
| | | 1006 | CCGGCCGCGTTGGAGAAGAGCTGGA | | |
| | | 1007 | GGCATCATGCTGGATGCCTTCGCCC | | |
| | | 1008 | TGCCTTCGCCCAAGAGATGGACCAC | | |
| | | 1009 | TCCCGCATGGACGGGGTCCTCAGGA | | |
| | | 1010 | GTATCCCACATGACGAGTGACCGCC | | |
| | | 1011 | TGGTCCCTTAAGCCTGGGGAGCCAC | | |
| | | 1012 | GGAGCCACCAAGCACTTTGGAGCTG | | |
| WWP1 | 212638_s_at | 1013 | GGATCTACCACCATATAAGAGTTAT | ggatctaccaccatataagagttatgaacaactaaaggaaaaacttctttttg | BF131791 |
| | | | | caatagaagagacagagggattnggacaagaatgaatgtggcttcttatttng | |
| | | | | gaggagctcttgcatttaaataccccagccaagaaaaattgcacagatagtgt | |
| | | | | atataagctgttcattctgtacagtgaattttccgaacctctcaaagtatgtt | |
| | | | | ttccgttcttccacagaaatatgcaaaacagttcatccttttctactttattt | |
| | | | | attgttcccttgaaatgactgaccaggaaaaagatcatccttaaattttgaag | |
| | | | | caagtgagagactttattaaaaatacatatatatctatataaacatatatgat | |
| | | | | agtggctctagttttatagagctccaagtgtattaaacatgacagccattcattcata | |
| | | | | aagatctggatttgctttaccttgttaa | |
| | | 1014 | GGAGCTCTTGCATTTAAATACCCCA | | |
| | | 1015 | TGCATTTAAATACCCCAGCCAAGAA | | |
| | | 1016 | AAGCTGTTCATTCTGTACAGTGAAT | | |
| | | 1017 | TACAGTGAATTTTCCGAACCTCTCA | | |
| | | 1018 | GAACCTCTCAAAGTATGTTTTCCGT | | |
| | | 1019 | ATGTTTTCCGTTCTTCCACAGAAAT | | |
| | | 1020 | GCAAAACAGTTCATCCTTTTCTACT | | |
| | | 1021 | ATTGTTCCCTTGAAATGACTGACCA | | |
| | | 1022 | TATGATAGTGGCTCTAGTTTTATAG | | |
| | | 1023 | ATCTGGATTTGCTTTACCTTGTTAA | | |
| RFTN1 | 212646_at | 1024 | TGCTGTTCATCCCACATCGTGTGGG | tgctgttcatcccacatcgtgtggggcagtgtccatcccctgcagctacttgg | D42043.1 |
| | | | | tgacttaacaactccaggagccctgtcagctgccctcctccanctaaanccct | |
| | | | | tcgactcttctgctttgacaaagaaaatgacattgggganggggaggtgctcc | |
| | | | | gcctcccagcttttctcaaaatagtcctatagatactggtaatctggaaatga | |
| | | | | agaagtaattctgtctctgcacctacttttgcagaatgttcaaggaagtattc | |
| | | | | tgtgttagtattaatgccaaaaagttgtttttaaaggttttgtactcagcaca | |
| | | | | tcatacaaaccacattacttctgtcacttcagggcatcgggactggctggcgc | |
| | | | | ccttgttatgtgctattttaatcagtgtaacattggtcaagttgttacccatg | |
| | | | | tatgctgtgtttatcatgtgtatatcgtccagaaagtattaaggctttaggta | |
| | | | | gatgcaactggcgaaccttggagagggaatgctgattgtcttgaccaaacccaca | |
| | | 1025 | CCTGCAGCTACTTGGTGACTTAACA | | |
| | | 1026 | TAACAACTCCAGGAGCCCTGTCAGC | | |
| | | 1027 | GTCTCTGCACCTACTTTTGCAGAAT | | |
| | | 1028 | TACAAACCACATTACTTCTGTCACT | | |
| | | 1029 | CTGTCACTTCAGGGCATCGGGACTG | | |
| | | 1030 | GCGCCCTTGTTATGTGCTATTTTAA | | |
| | | 1031 | GTTACCCATGTATGCTGTGTTTATC | | |
| | | 1032 | GTTTATCATGTGTATATCGTCCAGA | | |
| | | 1033 | GATGCAACTGGCGAACCTTGGAGAG | | |
| | | 1034 | GCTGATTGTCTTGACCAAACCCACA | | |
| IL1RN | 212657_s_at | 1035 | GGTACTATGTTAGCCCCATAATTTT | ggtactatgttagccccataattttttttttccttttaaaacacttccataat | AW083357 |
| | | | | ctggactcctctgtccaggcactgctgcccagcctccaagctccatctccact | |
| | | | | ccagattttttacagctgcctgcagtactttacctcctatcagaagtttctca | |
| | | | | gctcccaaggctctgagcaaatgtggctcctgggggttctttcttcctctgct | |
| | | | | gaaggaataaattgctccttgacattgtagagcttctggcacttggagacttg | |
| | | | | tatgaaagatggctgtgcctctgcctgtctcccccaccnggctgggagctctg | |
| | | | | cagagcaggaaacatgactcgtatatgtctcaggtccctgcagggccaagcac | |
| | | | | ctagcctcgctcttggcaggtactcagcgaatgaatgctgtatatgttgggtgcaaag | |
| | | | | ttccctacttcctgtgacttcagctctgtttta | |
| | | 1036 | ACACTTCCATAATCTGGACTCCTCT | | |
| | | 1037 | GATTTTTTACAGCTGCCTGCAGTAC | | |
| | | 1038 | CAGTACTTTACCTCCTATCAGAAGT | | |
| | | 1039 | AGCTCCCAAGGCTCTGAGCAAATGT | | |
| | | 1040 | GAGCAAATGTGGCTCCTGGGGGTTC | | |
| | | 1041 | ATAAATTGCTCCTTGACATTGTAGA | | |
| | | 1042 | TGACTCGTATATGTCTCAGGTCCCT | | |
| | | 1043 | CTCTTGGCAGGTACTCAGCGAATGA | | |
| | | 1044 | TGTTGGGTGCAAAGTTCCCTACTTC | | |
| | | 1045 | TTCCTGTGACTTCAGCTCTGTTTTA | | |
| ZNF364 | 212742_at | 1046 | TGAGGACTCTACTCGGCAAAGCCAG | ttaccttgcaatcacttctttcacagcagttgtattgtgccgtggctagaact | AL530462 |
| | | | | gcatgacacatgtcctgtatgtaggaagagcttaaatggtgaggactctactc | |
| | | | | ggcaaagccagagcactgaggcctctgcaagcaacagatttagcaatgacagt | |
| | | | | cagctacatgaccgatggactttctgaagctaaagaccacacctgaatcaggg | |
| | | | | ctgtggtaatcatcttaccatagctgtaaattgtatcaaaacaaaaaattagt | |
| | | | | agatggatttaggaatatgtaagaaactcaacacataatataaatgcaatgaa | |
| | | | | tgtttttcttctttaaatttaaagttagtatctacagatggaattgtatctac | |
| | | | | aaccaaatgcctcttatccctgaattcagagtgataattttataagtgtgaaa | |
| | | | | cttaattatgtagggctccccccgtctgaatagaattaattccttaaagtcta | |
| | | | | gttagggtcctgctgtctgtcatgttgccttgtaacggatgtttccacctccttctcc | |
| | | | | aacctctaccccaccattagtgtatttt | |
| | | 1047 | CACTGAGGCCTCTGCAAGCAACAGA | | |
| | | 1048 | CATGACCGATGGACTTTCTGAAGCT | | |
| | | 1049 | GAATCAGGGCTGTGGTAATCATCTT | | |
| | | 1050 | ATCTACAACCAAATGCCTCTTATCC | | |
| | | 1051 | TCTAGTTAGGGTCCTGCTGTCTGTC | | |
| | | 1052 | CTGTCTGTCATGTTGCCTTGTAACG | | |
| | | 1053 | CTCTACCCCACCATTAGTGTATTTT | | |
| | | 1054 | TTACCTTGCAATCACTTCTTTCACA | | |
| | | 1055 | ACAGCAGTTGTATTGTGCCGTGGCT | | |
| | | 1056 | GTGCCGTGGCTAGAACTGCATGACA | | |
| PPP1R16B | 212750_at | 1057 | TAACTTGGGGATGGTCTCCCCTGCC | taacttggggatggtctcccctgccccagggcacataagagcaaaggctccaa | AB020630.1 |
| | | | | tggtcagtggatgactctgcaaaagtgaccccctgtgccagaagctatagccc | |
| | | | | tctccccaacaggtctctcttgttggccagagggcctgcttcccatgggcatt | |
| | | | | gcaagtgccaccgtgcggggcctggctctgcacacccaggaaaagtctgcaga | |
| | | | | cccccagccctccgcaataattcaccagaccagaagccactggtgtacagaga | |
| | | | | acacttaaaaaaatgtattttatgtgaaaaaaaattaaaactctgtatactgt | |
| | | | | atcagcagctttgtgtaaaaatggcaatcaagagagtctaatatatttaaaac | |
| | | | | ttttttaaaaaaaatcttcgcagatctttgatatcgtactgaggtaacttcca | |
| | | | | cgtagccccttgccacgcggcaccggtgggccttgggtccaaaactgtggctc | |
| | | | | agccacatcccaaagggggcacatgtccctggagttgcttccagctgccaaggcctgt | |
| | | | | gacagaattcgctgtt | |
| | | 1058 | CTGCCCCAGGGCACATAAGAGCAAA | | |
| | | 1059 | GGATGACTCTGCAAAAGTGACCCCC | | |
| | | 1060 | CTCCCCAACAGGTCTCTCTTGTTGG | | |
| | | 1061 | CCTGCTTCCCATGGGCATTGCAAGT | | |
| | | 1062 | ATGGGCATTGCAAGTGCCACCGTGC | | |
| | | 1063 | CTCCGCAATAATTCACCAGACCAGA | | |
| | | 1064 | GTATACTGTATCAGCAGCTTTGTGT | | |
| | | 1065 | AAAATCTTCGCAGATCTTTGATATC | | |
| | | 1066 | TACTGAGGTAACTTCCACGTAGCCC | | |
| | | 1067 | AAGGCCTGTGACAGAATTCGCTGTT | | |
| NCAM1 | 212843_at | 1068 | GAATGTGAGAGCCTGGGTGTCTGAG | gaatgtgagagcctgggtgtctgagaccgggagggcccagcagtgaggggcag | AA126505 |
| | | | | gctcttctggtcaccaggctgttcagtggactcagttcttcatcttgtaatgt | |
| | | | | cgatggctttgccacaccaggccaagcccatgccataccttgtcaagactgtc | |
| | | | | aaagtggttgtggttaggtcaaactggttttggttctgatggttaggaagaaa | |
| | | | | caggtcagccctcagatcacctggcccgggacagctgaccccctagaaccctg | |
| | | | | gctctgccattagctaggacctaagactctgcccacattttggtctgttctctcccat | |
| | | | | tacacataggtttgtctcagcatgcaagagt | |
| | | 1069 | GCCTGGGTGTCTGAGACCGGGAGGG | | |
| | | 1070 | CTCTTCTGGTCACCAGGCTGTTCAG | | |
| | | 1071 | GGCTGTTCAGTGGACTCAGTTCTTC | | |
| | | 1072 | GGACTCAGTTCTTCATCTTGTAATG | | |
| | | 1073 | CTTGTAATGTCGATGGCTTTGCCAC | | |
| | | 1074 | CATGCCATACCTTGTCAAGACTGTC | | |
| | | 1075 | GAAGAAACAGGTCAGCCCTCAGATC | | |
| | | 1076 | GCTCTGCCATTAGCTAGGACCTAAG | | |
| | | 1077 | TTAGCTAGGACCTAAGACTCTGCCC | | |
| | | 1078 | TAGGTTTGTCTCAGCATGCAAGAGT | | |
| NKG7 | 213915_at | 1079 | ATTTCTGGTTTGAGGCTGTGGGTCC | atttctggtttgaggctgtgggtcccacccactcagctcactcgggcctctgg | NM_005601.1 |
| | | | | ccaacagggcatggngacatcatatcaggctacatccacgtgacgcagacctt | |
| | | | | cagcattatggctgttctgtgggccctggtgtccgtgagcttcctggtcctgt | |
| | | | | cctgcttcccctcactgttccccccaggccacggcccgcttgtctcaaccacc | |
| | | | | gcagcctttgctgcagccatctccatggtggtggccatggcggtgtacaccag | |
| | | | | cgagcggtgggaccagcctccacacccccagatccagaccttcttctcctggt | |
| | | | | ccttctacctgggctgggtctcagctatcctcttgctctgtacaggtgccctg | |
| | | | | agcctgggtgctcactgtggcggtccccgtcctggctatgaaaccttgtgagcagaa | |
| | | | | ggcaagagcggcaagatgagttttgagcgttgtattcca | |
| | | 1080 | GACATCATATCAGGCTACATCCACG | | |
| | | 1081 | TCATATCAGGCTACATCCACGTGAC | | |
| | | 1082 | ACGCAGACCTTCAGCATTATGGCTG | | |
| | | 1083 | CATTATGGCTGTTCTGTGGGCCCTG | | |
| | | 1084 | TGGCCATGGCGGTGTACACCAGCGA | | |
| | | 1085 | TACACCAGCGAGCGGTGGGACCAGC | | |
| | | 1086 | CTATCCTCTTGCTCTGTACAGGTGC | | |
| | | 1087 | CGTCCTGGCTATGAAACCTTGTGAG | | |
| | | 1088 | GTGAGCAGAAGGCAAGAGCGGCAAG | | |
| | | 1089 | GATGAGTTTTGAGCGTTGTATTCCA | | |
| HLA-A | 213932_x_at | 1090 | GAAGAACCCTGACTTTGTTTCTGCA | gacagacctcaggagggctattggtccaggacccacacctgctttcttcatgt | AI923492 |
| /// HLA- | | | | ttcctgatcccgccctgggtctgcagtcacacatttctggaaacttctctggg | |
| H /// | | | | gtccaagactaggaggttcnnctnggaccttanggccntggntcntttctggt | |
| LOC642047 | | | | atctcacanggacattnncttctcacagatagaaaaggagggagttacactca | |
| /// | | | | ggctgcanncagtgacagtgcccaggctctgatgtgtcnctcacagcttgtaa | |
| LOC649853 | | | | agtgtgagacagctgccttgtgtgggactgagaggcaagagttgttcctgccc | |
| /// | | | | ttccctttgtgacttgaagaaccctgactttgtttctgcaaaggcacctgcat | |
| LOC649864 | | | | gtgtctgtgttcgtgtaggcntaatgtgaggaggtggggagaccaccccaccc | |
| | | | | cnatgtccaccatgaccctcttcccacgctgacctgtgctccctccccaatca | |
| | | | | tctttcctgttccagagaggtggggctgaggtgtctccatctctgtctcaacttcat | |
| | | | | ggtgcactgagctgtaacttcttc | |
| | | 1091 | AAGGCACCTGCATGTGTCTGTGTTC | | |
| | | 1092 | CAATCATCTTTCCTGTTCCAGAGAG | | |
| | | 1093 | CATCTCTGTCTCAACTTCATGGTGC | | |
| | | 1094 | TGGTGCACTGAGCTGTAACTTCTTC | | |
| | | 1095 | GACAGACCTCAGGAGGGCTATTGGT | | |
| | | 1096 | GGCTATTGGTCCAGGACCCACACCT | | |
| | | 1097 | GGTCTGCAGTCACACATTTCTGGAA | | |
| | | 1098 | GGAAACTTCTCTGGGGTCCAAGACT | | |
| | | 1099 | AGACAGCTGCCTTGTGTGGGACTGA | | |
| | | 1100 | TGCCCTTCCCTTTGTGACTTGAAGA | | |
| YPEL1 | 213996_at | 1101 | GCCGAACTGTCACCGAACGTACAGC | gccgaactgtcaccgaacgtacagctgtatccactgcagagcacacctggcca | NM_013313.1 |
| | | | | atcatgacgagctcatctccaagtcctttcaggggagccagggacgcgcctac | |
| | | | | ctcttcaattccgtggtgaacgtgggctgcggccctgcagaggagagggtcct | |
| | | | | tctcaccgggctgcatgcggttgccgacatctactgcgagaactgcaagacca | |
| | | | | cgctcgggtggaaatacgagcatgcctttgagagcagtcagaaatataaggaa | |
| | | | | ggaaaattcatcattgagcttgctcatatgatcaaagacaatggctgggagta | |
| | | | | atgtgcgaactttcccttctccttngaatgctgttttgtgaaagaaactgtga | |
| | | | | atgtaatggaaacgtaggagcatctggtgacagcctttcttgccctctgacct | |
| | | | | caaaggctagctgcgcatagctcttgacactcncggccatctctgtgggtaaggtgt | |
| | | | | ccctcggatctgtcctcttcgtgtacacagttgtt | |
| | | 1102 | CGTACAGCTGTATCCACTGCAGAGC | | |
| | | 1103 | ACACCTGGCCAATCATGACGAGCTC | | |
| | | 1104 | TCCAAGTCCTTTCAGGGGAGCCAGG | | |
| | | 1105 | TGCATGCGGTTGCCGACATCTACTG | | |
| | | 1106 | GAGTAATGTGCGAACTTTCCCTTCT | | |
| | | 1107 | TAGGAGCATCTGGTGACAGCCTTTC | | |
| | | 1108 | GCCCTCTGACCTCAAAGGCTAGCTG | | |
| | | 1109 | TAGCTGCGCATAGCTCTTGACACTC | | |
| | | 1110 | TGTGGGTAAGGTGTCCCTCGGATCT | | |
| | | 1111 | TGTCCTCTTCGTGTACACAGTTGTT | | |
| ZAP70 | 214032_at | 1112 | AAGGGCCGGAGGTCATGGCCTTCAT | aagggccggaggtcatggccttcatcgagcagggcaagcggatggantgccca | AI817942 |
| | | | | ccagagtgtnccacccgaactgtacgcactcatgagtgactgctggatctaca | |
| | | | | agtgggaggatcgccccgacttcctgaccgtggagcagcgcatgcgagcctgt | |
| | | | | tactacagcctggccagcaaggtggaagggcccccaggcagcacacagaaggc | |
| | | | | tgaggctgcctgtgcctgagctcccgctgcccaggggagccctccacnccggc | |
| | | | | tcttccccaccctcagccccaccccaggtcctgcagtctggctgagccctgct | |
| | | | | tggttgtctccacacacagctgggctgtggtagggggtgtctcaggccacacc | |
| | | | | ggccttgcattgcctgcctggccccctgtcctctctggctggggagcagggag | |
| | | | | gtccgggagggtgcggctgtgcagcctgtcctgggctggtggctcccggaggg | |
| | | | | ccctgagctgagggcattgcttacacggatgccttcccctgggccctgacatt | |
| | | | | ggagcctgggcatcctcaggtggtcaggcgtagatcaccagaataaacccagcttccc | |
| | | 1113 | CCCGAACTGTACGCACTCATGAGTG | | |
| | | 1114 | TCATGAGTGACTGCTGGATCTACAA | | |
| | | 1115 | CATGCGAGCCTGTTACTACAGCCTG | | |
| | | 1116 | CACAGCTGGGCTGTGGTAGGGGGTG | | |
| | | 1117 | AGCAGGGAGGTCCGGGAGGGTGCGG | | |
| | | 1118 | GGCATTGCTTACACGGATGCCTTCC | | |
| | | 1119 | TGGGCCCTGACATTGGAGCCTGGGC | | |
| | | 1120 | TGACATTGGAGCCTGGGCATCCTCA | | |
| | | 1121 | GGTGGTCAGGCGTAGATCACCAGAA | | |
| | | 1122 | ATCACCAGAATAAACCCAGCTTCCC | | |
| CTSW | 214450_at | 1123 | GGAGAGAAGGGCTATTTCCGGCTGC | caggacttcatcatgctgcagaacaacgagcacagaattgcgcagtacctggc | NM_001335.1 |
| | | | | cacttatggccccatcaccgtgaccatcaacatgaagccccttcagctatacc | |
| | | | | ggaaaggtgtgatcaaggccacacccaccacctgtgacccccagcttgtggac | |
| | | | | cactctgtcctgctggtgggttttggcagcgtcaagtcagaggaggggatatg | |
| | | | | ggcagagacagtctcatcgcagtctcagcctcagcctccacaccccaccccat | |
| | | | | actggatcctgaagaactcctggggggcccaatggggagagaagggctatttc | |
| | | | | cggctgcaccgagggagcaatacctgtggcatcaccaagttcccgctcactgcccgtg | |
| | | | | tgcagaaaccggatatgaagccccgagtctc | |
| | | 1124 | CGGCTGCACCGAGGGAGCAATACCT | | |
| | | 1125 | ATACCTGTGGCATCACCAAGTTCCC | | |
| | | 1126 | CTCACTGCCCGTGTGCAGAAACCGG | | |
| | | 1127 | AACCGGATATGAAGCCCCGAGTCTC | | |
| | | 1128 | CAGGACTTCATCATGCTGCAGAACA | | |
| | | 1129 | GCGCAGTACCTGGCCACTTATGGCC | | |
| | | 1130 | AGCCCCTTCAGCTATACCGGAAAGG | | |
| | | 1131 | GGGTTTTGGCAGCGTCAAGTCAGAG | | |
| | | 1132 | GAGACAGTCTCATCGCAGTCTCAGC | | |
| | | 1133 | CCACCCCATACTGGATCCTGAAGAA | | |
| PRF1 | 214617_at | 1134 | CCAACGCAAATTCGCAAACTTTCTT | ccaacgcaaattcgcaaactttcttaaaacattatgagttncnntttgctatt | AI445650 |
| | | | | tttttttttttttttagctcatcggctatcgttagtgctagtggattttacat | |
| | | | | gtggcccnnnannnnnnnncnnncaacgtggcccagagaagccaaaagattgg | |
| | | | | atacgcatcagacagatggaaaagggagattcagactgtttttcagggaggtg | |
| | | | | gctgggtttacacgctaatcccgattcaccctgtccaaactgcctaagccctc | |
| | | | | cgccattntcaagccctgcagtcacagctacacagatcacagcttcagccagg | |
| | | | | agctgggcagaaggccaanaggctgttcccaccaggctgctcagggntggtct | |
| | | | | tttaggacccttcccttgagccctntatggtgtggcaaagccttcattgcctt | |
| | | | | aactggagccccatcagctccagctgctctgtnttntttgcccncaatgcttt | |
| | | | | gcccctgagacaaatggaggcctgtcctgacctgtctcaccatgtacatagctt | |
| | | 1135 | GCTCATCGGCTATCGTTAGTGCTAG | | |
| | | 1136 | TGCTAGTGGATTTTACATGTGGCCC | | |
| | | 1137 | AGATTGGATACGCATCAGACAGATG | | |
| | | 1138 | GAGGTGGCTGGGTTTACACGCTAAT | | |
| | | 1139 | GGGTTTACACGCTAATCCCGATTCA | | |
| | | 1140 | GCAGTCACAGCTACACAGATCACAG | | |
| | | 1141 | GCCTTCATTGCCTTAACTGGAGCCC | | |
| | | 1142 | CAATGCTTTGCCCCTGAGACAAATG | | |
| | | 1143 | GACAAATGGAGGCCTGTCCTGACCT | | |
| | | 1144 | ACCTGTCTCACCATGTACATAGCTT | | |
| SULT1A1 | 215299_x_at | 1145 | AAGATCCTGGAGTTTGTGGGGCGCT | aagatcctggagtttgtggggcgctccctnccagaggagacngtggacntcat | U37025 |
| | | | | ggttnagcacacgtcgttcaaggagatgaagaagaaccctatgaccaactaca | |
| | | | | ccaccgtccnccnggagttcatggaccacagcatctcccccttcatgaggaaa | |
| | | | | ggcatggctggggacnngngnngnccacnttcaccgtggcgcagaatgagcgc | |
| | | | | ttcgatgcggacntatgcggagaagatggcaggncngcagcctcangcttccg | |
| | | | | ctntgagcngtgagaggggnnncntggagtcacngcagagggagtgtgcgaat | |
| | | | | caaacctgaccaagcggntcaagaataaaatatgaattgagggccngggacgg | |
| | | | | taggtcatgtctgtaatcccagcaatttggaggctgaggtgggaggatcattt | |
| | | | | gagcccaggagttcgagaccaacctgggcaacatagtgagattctgttaaaaa | |
| | | | | aataaaataaaataaaaccaatttttaaaaagagaataaaatatgattgtgggccagg | |
| | | | | cagagtggctcatgc | |
| | | 1146 | AGCACACGTCGTTCAAGGAGATGAA | | |
| | | 1147 | AGAAGAACCCTATGACCAACTACAC | | |
| | | 1148 | GGAGTTCATGGACCACAGCATCTCC | | |
| | | 1149 | CATCTCCCCCTTCATGAGGAAAGGC | | |
| | | 1150 | TTCACCGTGGCGCAGAATGAGCGCT | | |
| | | 1151 | GCAGAATGAGCGCTTCGATGCGGAC | | |
| | | 1152 | GGGAGTGTGCGAATCAAACCTGACC | | |
| | | 1153 | GTGCGAATCAAACCTGACCAAGCGG | | |
| | | 1154 | GGACGGTAGGTCATGTCTGTAATCC | | |
| | | 1155 | GTGGGCCAGGCAGAGTGGCTCATGC | | |
| C7ORF24 | 215380_s_at | 1156 | GAAAATGGTTTGCCGCTGGAGTATC | gaaaatggtttgccgctggagtatcaagagaagttaaaagcaatagaaccaaa | AK021779.1 |
| | | | | tgactatacaggaaaggtctcagaagaaattgaagacatcatcaaaaaggggg | |
| | | | | aaacacaaactctttagaacataacagaatatatctaagggtattctatgtgc | |
| | | | | taatataaaatatttttaacacttgagaacagggatctgggggatctccacgt | |
| | | | | ttgatccattttcagcagtgctctgaaggagtatcttacttgggtgattcctt | |
| | | | | gtttttagactataaaaagaaactgggataggagttagacaatttaaaagggg | |
| | | | | tgtatgagggcctgaaatatgtgacaaatgaatgtgagtaccccttctatgaa | |
| | | | | cactgaaagctattctcttgaattgatcttaagtgtctccttgctctggtaaa | |
| | | | | agatagatttgtagctcacttgatgatggtgctggtgaattgctctgctctgtctgag | |
| | | | | att | |
| | | 1157 | ATCTAAGGGTATTCTATGTGCTAAT | | |
| | | 1158 | ATCTGGGGGATCTCCACGTTTGATC | | |
| | | 1159 | CAGCAGTGCTCTGAAGGAGTATCTT | | |
| | | 1160 | GGAGTATCTTACTTGGGTGATTCCT | | |
| | | 1161 | GGGTGATTCCTTGTTTTTAGACTAT | | |
| | | 1162 | ACAAATGAATGTGAGTACCCCTTCT | | |
| | | 1163 | ATTGATCTTAAGTGTCTCCTTGCTC | | |
| | | 1164 | GTGTCTCCTTGCTCTGGTAAAAGAT | | |
| | | 1165 | AGATAGATTTGTAGCTCACTTGATG | | |
| | | 1166 | GAATTGCTCTGCTCTGTCTGAGATT | | |
| HOMER3 | 215489_x_at | 1167 | CAATGTCCACAGCCAGGGAGCAGCC | gagggacactcatagtccctcctctctccctaggggccaaaccagtgctcctg | AI871287 |
| | | | | ccacctctctggctgccccctagagcctgcccatcccagcctgaccaatgtcc | |
| | | | | acagccagggagcagccaatcttcagcacacgggcgcacgtgttccaaattga | |
| | | | | cccagccaccaagcgaaactggatcccagcgggcaagcacgcactcactgtct | |
| | | | | cctatttctacgatgccacccgcaatgtgtaccgcatcatcagcatcggaggc | |
| | | | | gccaaggccatcatcaacagcactgtcactcccaacatgaccttcaccaaaac | |
| | | | | ttcccagaagttcgggcagtgggccgacagtcgcgccaacacagtctatggcc | |
| | | | | tgggctttgcctctgaacagcatctgacacagtttgccgagaagttccaggaa | |
| | | | | gtgaaggaagcagccaggctggccagggagaaatctcaggatggctggggtgg | |
| | | | | gccccagtcggctctggttgttggcagctttggggctgtttttgagcttctcatt | |
| | | 1168 | GGGCGCACGTGTTCCAAATTGACCC | | |
| | | 1169 | GTACCGCATCATCAGCATCGGAGGC | | |
| | | 1170 | GGCCATCATCAACAGCACTGTCACT | | |
| | | 1171 | AAGTTCGGGCAGTGGGCCGACAGTC | | |
| | | 1172 | AGTCGCGCCAACACAGTCTATGGCC | | |
| | | 1173 | GCTTTGCCTCTGAACAGCATCTGAC | | |
| | | 1174 | GACACAGTTTGCCGAGAAGTTCCAG | | |
| | | 1175 | CCCAGTCGGCTCTGGTTGTTGGCAG | | |
| | | 1176 | TGGGGCTGTTTTTGAGCTTCTCATT | | |
| | | 1177 | GAGGGACACTCATAGTCCCTCCTCT | | |
| LILRA5 | 215838_at | 1178 | TCCTGCAGGTATGGTCAGAACCCAG | tcctgcaggtatggtcagaacccagtgacctcctggagattccggtctcagga | AF212842.1 |
| | | | | gcagctgataacctcagtccgtcacanaacaagtctgactctgggactgcctc | |
| | | | | acaccttcaggattacgcagtagagaatctcatccgcatgggcatggccggct | |
| | | | | tgatcctggtggtccttgggattctgatatttcaggattggcacagccagaga | |
| | | | | agcccccaagctgcagctggaaggtgaacagaagagagaacaatgcaccattg | |
| | | | | aatgctggagccttggaagcgaatctgatggtcctaggaggttcgggaagaccatctg | |
| | | | | aggcctatgccatctggactgtctgctggcaatttcttt | |
| | | 1179 | TGGAGATTCCGGTCTCAGGAGCAGC | | |
| | | 1180 | GAGCAGCTGATAACCTCAGTCCGTC | | |
| | | 1181 | TGCCTCACACCTTCAGGATTACGCA | | |
| | | 1182 | GGTCCTTGGGATTCTGATATTTCAG | | |
| | | 1183 | AATGCACCATTGAATGCTGGAGCCT | | |
| | | 1184 | GCTGGAGCCTTGGAAGCGAATCTGA | | |
| | | 1185 | GCGAATCTGATGGTCCTAGGAGGTT | | |
| | | 1186 | GGTTCGGGAAGACCATCTGAGGCCT | | |
| | | 1187 | TGAGGCCTATGCCATCTGGACTGTC | | |
| | | 1188 | TGGACTGTCTGCTGGCAATTTCTTT | | |
| PTGDR | 215894_at | 1189 | CGCGCGCGGACGGGAGGGAAGCGTC | gccatgcgcaacctctatgcgatgcaccggcggctgcagcggcacccgcgctc | U31099.1 |
| | | | | ctgcaccagggactgtgccgagccgcgcgcggacgggagggaagcgtcccctc | |
| | | | | agcccctggaggagctggatcacctcctgctgctggcgctgatgaccgtgctc | |
| | | | | ttcactatgtgttctctgcccgtaatttatcgcgcttactatggagcatttaa | |
| | | | | ggatgtcaaggagaaaaacaggacctctgaagaagcagaagacctccgagcct | |
| | | | | tgcgatttctatctgtgatttcaattgtggacccttggatttttatcattttc | |
| | | | | agatctccagtatttcggatattttttcacaagattttcattagacctcttag | |
| | | | | gtacaggagccggtgcagcaattccactaacatggaatccagtctgtgacagtgttt | |
| | | | | ttcactc | |
| | | 1190 | TGCCCGTAATTTATCGCGCTTACTA | | |
| | | 1191 | GAAGAAGCAGAAGACCTCCGAGCCT | | |
| | | 1192 | AGCCTTGCGATTTCTATCTGTGATT | | |
| | | 1193 | GCCATGCGCAACCTCTATGCGATGC | | |
| | | 1194 | GATTTCAATTGTGGACCCTTGGATT | | |
| | | 1195 | TTTTCAGATCTCCAGTATTTCGGAT | | |
| | | 1196 | TTTCACAAGATTTTCATTAGACCTC | | |
| | | 1197 | AGACCTCTTAGGTACAGGAGCCGGT | | |
| | | 1198 | AACATGGAATCCAGTCTGTGACAGT | | |
| | | 1199 | CAGTCTGTGACAGTGTTTTTCACTC | | |
| LPXN | 216250_s_at | 1200 | GCTTTCTGCCTGACACAGTTGTCGA | gctttctgcctgacacagttgtcgaagggcattttcagggagcagaatgacaa | X77598.1 |
| | | | | gacctattgtcaaccttgcttcaataagctcttcccactgtaatgccaactga | |
| | | | | tccatagcctcttcagattccttataaaatttaaaccaagagaggagaggaaa | |
| | | | | gggtaaattttctgttactgaccttctgcttaatagtcttatagaaaaaggaa | |
| | | | | aggtgatgagcaaataaaggaacttctagactttacatgactaggctgataat | |
| | | | | cttattttttaggcttctatacagttaattctataaattctctttctccctct | |
| | | | | cttctccaatcaagcacttggagttagatctaggtccttctatctcgtccctc | |
| | | | | tacagatgtattttccacttgcataattcatgccaacactggttttcttaggt | |
| | | | | ttctccattttcacctctagtgatggccctactcatatcttctctaatttggt | |
| | | | | cctgatacttgtttcttttcacgttttcccatttccctgtggctcactgtcttacaa | |
| | | | | tcactg | |
| | | 1201 | AAGACCTATTGTCAACCTTGCTTCA | | |
| | | 1202 | TCTTCCCACTGTAATGCCAACTGAT | | |
| | | 1203 | CCAACTGATCCATAGCCTCTTCAGA | | |
| | | 1204 | CTGTTACTGACCTTCTGCTTAATAG | | |
| | | 1205 | GTTAGATCTAGGTCCTTCTATCTCG | | |
| | | 1206 | TATCTCGTCCCTCTACAGATGTATT | | |
| | | 1207 | TTTCACCTCTAGTGATGGCCCTACT | | |
| | | 1208 | ACTCATATCTTCTCTAATTTGGTCC | | |
| | | 1209 | GGTCCTGATACTTGTTTCTTTTCAC | | |
| | | 1210 | GTGGCTCACTGTCTTACAATCACTG | | |
| PYHIN1 | 216748_at | 1211 | CCACCCTCTGGATCCCAATATTGAG | ccaccctctggatcccaatattgagatcttatcctcagggaatcctcacttag | AK024890.1 |
| | | | | acccctgtaacaggttaaatcttcatggtgttctgtttcctaggaacttcttt | |
| | | | | cttttctactgtttatgacaactgaagttaataagtgtttatctttcccacct | |
| | | | | actcaaagtagttccaagattagggctagtttgtaattctgtggaccactgta | |
| | | | | aacgagggcctagttcagtgtctgcctcatgggaagcttccaataaatacctttg | |
| | | 1212 | TTATCCTCAGGGAATCCTCACTTAG | | |
| | | 1213 | CCTCACTTAGACCCCTGTAACAGGT | | |
| | | 1214 | AAATCTTCATGGTGTTCTGTTTCCT | | |
| | | 1215 | GTGTTCTGTTTCCTAGGAACTTCTT | | |
| | | 1216 | TAATAAGTGTTTATCTTTCCCACCT | | |
| | | 1217 | ATCTTTCCCACCTACTCAAAGTAGT | | |
| | | 1218 | GTAGTTCCAAGATTAGGGCTAGTTT | | |
| | | 1219 | GTGGACCACTGTAAACGAGGGCCTA | | |
| | | 1220 | CGAGGGCCTAGTTCAGTGTCTGCCT | | |
| | | 1221 | GGGAAGCTTCCAATAAATACCTTTG | | |
| SLC35E2 | 217122_s_at | 1222 | GTCTCTGAAGTATTTCCTCCAGTTT | gtctctgaagtatttcctccagtttccctgcgggcccctatgtttgagtttga | AL031282 |
| | | | | tggctgctggatcctcactcaacgaaaactcggttggaaactgttccgcctgg | |
| | | | | cagtccttttttgttgttttccatctcatttcccttccatctgaaagtggcat | |
| | | | | tcagctgacttgctcatttagactgttcacggagtctgaatctgccaacgtgg | |
| | | | | tgttggaggctccaccttgaaaagggccacagtcagggcaactttccccatac | |
| | | | | aggaaaacttgaaaattacatcaacagtctacgtcacagccaaattatatttc | |
| | | | | ctttataccaaacaaaactatggagaactaaaagtacatcacacaaaacgttt | |
| | | | | atagtgttttgcatgtgacctatttcagtatttatataactagattagtgctt | |
| | | | | tctagcaaacggttctgttaattagcgagtcactgttgattctgctgtggtggtaag | |
| | | | | ttgataccgtgtaactaatcccgtggat | |
| | | 1223 | GGGCCCCTATGTTTGAGTTTGATGG | | |
| | | 1224 | GGATCCTCACTCAACGAAAACTCGG | | |
| | | 1225 | CTCGGTTGGAAACTGTTCCGCCTGG | | |
| | | 1226 | GACTTGCTCATTTAGACTGTTCACG | | |
| | | 1227 | GAGTCTGAATCTGCCAACGTGGTGT | | |
| | | 1228 | TCAGGGCAACTTTCCCCATACAGGA | | |
| | | 1229 | TACATCAACAGTCTACGTCACAGCC | | |
| | | 1230 | GTGCTTTCTAGCAAACGGTTCTGTT | | |
| | | 1231 | TAGCGAGTCACTGTTGATTCTGCTG | | |
| | | 1232 | ATACCGTGTAACTAATCCCGTGGAT | | |
| TRA@ // | 217143_s_at | 1233 | GTTGACCTGTCATAGCCTTGTTAAA | gaaggtgaacatgatgtccctcacagtgcttgggctacgaatgctgtttgcaa | X06557.1 |
| TRD@ | | | | agactgttgccgtcaattttctcttgactgccaagttatttttcttgtaaggc | |
| | | | | tgactggcatgaggaagctacactcctgaagaaaccaaaggcttacaaaaatg | |
| | | | | catctccttggcttctgacttctttgtgattcaagttgacctgtcatagcctt | |
| | | | | gttaaaatggctgctagccaaaccactttttcttcaaagacaacaaacccagc | |
| | | | | tcatcctccagcttgatgggaagacaaaagtcctggggaaggggggtttatgtcctaa | |
| | | | | ctgctttgta | |
| | | 1234 | TCAAAGACAACAAACCCAGCTCATC | | |
| | | 1235 | GCTCATCCTCCAGCTTGATGGGAAG | | |
| | | 1236 | GGGTTTATGTCCTAACTGCTTTGTA | | |
| | | 1237 | GAAGGTGAACATGATGTCCCTCACA | | |
| | | 1238 | GCTTGGGCTACGAATGCTGTTTGCA | | |
| | | 1239 | AGACTGTTGCCGTCAATTTTCTCTT | | |
| | | 1240 | AATTTTCTCTTGACTGCCAAGTTAT | | |
| | | 1241 | TTTTCTTGTAAGGCTGACTGGCATG | | |
| | | 1242 | GAAGCTACACTCCTGAAGAAACCAA | | |
| | | 1243 | AAAAATGCATCTCCTTGGCTTCTGA | | |
| TRATRD | 217147_s_at | 1244 | TCTCCTTTCTCACCAATGGGCAATA | tctcctttctcaccaatgggcaatagcccataattgaaataaatttctgattg | AJ240085.1 |
| | | | | aaaggtataggaaacattaaaatgcattactaagagaagtaatataattttct | |
| | | | | tacaaagtatttttcccaaagatagctttactatttcaaaaattgtcaaatta | |
| | | | | atgcatgctccttacaacaaacaaatatcaaaaagagtttaggaattctacta | |
| | | | | gccagagatagtcacttggagaaactttctatatatccttctaaatatttttc | |
| | | | | tgggcatgctcatgtatgtacatcagttgtttctttttattttgaaccaaaaa | |
| | | | | tgtggtttcttttgtacacattacttaaactttctttccagtcaacaatatat | |
| | | | | tgtggatttattttcactgttatatttaactatatataaatacgcatatattgtaat | |
| | | | | tttaatgtctgcttagcaccccactgataaccaaatcacag | |
| | | 1245 | TCCTTTCTCACCAATGGGCAATAGC | | |
| | | 1246 | TATTTTTCCCAAAGATAGCTTTACT | | |
| | | 1247 | GTCAAATTAATGCATGCTCCTTACA | | |
| | | 1248 | AATGCATGCTCCTTACAACAAACAA | | |
| | | 1249 | ATGCTCCTTACAACAAACAAATATC | | |
| | | 1250 | GAGTTTAGGAATTCTACTAGCCAGA | | |
| | | 1251 | ACTAGCCAGAGATAGTCACTTGGAG | | |
| | | 1252 | GATAGTCACTTGGAGAAACTTTCTA | | |
| | | 1253 | GAAACTTTCTATATATCCTTCTAAA | | |
| | | 1254 | CACCCCACTGATAACCAAATCACAG | | |
| S100A6 | 217728_at | 1255 | GGGACCGCTATAAGGCCAGTCGGAC | gggaccgctataaggccagtcggactgcgacatagcccatcccctcgaccgct | NM_014624.2 |
| | | | | cgcgtcgcatttggccgcctccctaccgctccaagcccagccctcagccatgg | |
| | | | | catgccccctggatcaggccattggcctcctcgtggccatcttccacaagtac | |
| | | | | tccggcagggagggtgacaagcacaccctgagcaagaaggagctgaaggagctgatc | |
| | | | | cagaaggagctcaccattggctcgaagctgcagg | |
| | | 1256 | TCGTGGCCATCTTCCACAAGTACTC | | |
| | | 1257 | TTCCACAAGTACTCCGGCAGGGAGG | | |
| | | 1258 | CCGCTATAAGGCCAGTCGGACTGCG | | |
| | | 1259 | TCCGGCAGGGAGGGTGACAAGCACA | | |
| | | 1260 | GACAAGCACACCCTGAGCAAGAAGG | | |
| | | 1261 | GCTGATCCAGAAGGAGCTCACCATT | | |
| | | 1262 | GAAGGAGCTCACCATTGGCTCGAAG | | |
| | | 1263 | AGCTCACCATTGGCTCGAAGCTGCA | | |
| | | 1264 | CTCACCATTGGCTCGAAGCTGCAGG | | |
| | | 1265 | GCCAGTCGGACTGCGACATAGCCCA | | |
| RAB31 | 217763_s_at | 1266 | AACATTGTAATGGCCATCGCTGGAA | aacattgtaatggccatcgctggaaacaagtgcgacctctcagatattaggga | NM_006868.1 |
| | | | | ggttcccctgaaggatgctaaggaatacgctgaatccataggtgccatcgtgg | |
| | | | | ttgagacaagtgcaaaaaatgctattaatatcgaagagctctttcaaggaatc | |
| | | | | agccgccagatcccacccttggacccccatgaaaatggaaacaatggaacaat | |
| | | | | caaagttgagaagccaaccatgcaagccagccgccggtgctgttgacccaagg | |
| | | | | gcgtggtccacggtacttgaagaagccagagcccacatcctgtgcactgctga | |
| | | | | aggaccctacgctcggtggcctggcacctcactttgagaagagtgagcacact | |
| | | | | ggctttgcatcctggaaggcctgcagggggcggggcaggaaatgtacctgaaa | |
| | | | | aggattttagaaaaccctgggaaacccaccacaccaccacaaaatggcctttagtgt | |
| | | 1267 | GAAACAAGTGCGACCTCTCAGATAT | | |
| | | 1268 | GGAGGTTCCCCTGAAGGATGCTAAG | | |
| | | 1269 | TACGCTGAATCCATAGGTGCCATCG | | |
| | | 1270 | GTGCCATCGTGGTTGAGACAAGTGC | | |
| | | 1271 | TTCAAGGAATCAGCCGCCAGATCCC | | |
| | | 1272 | TGAGAAGCCAACCATGCAAGCCAGC | | |
| | | 1273 | CGTGGTCCACGGTACTTGAAGAAGC | | |
| | | 1274 | ATCCTGTGCACTGCTGAAGGACCCT | | |
| | | 1275 | GAGTGAGCACACTGGCTTTGCATCC | | |
| | | 1276 | ACCACCACAAAATGGCCTTTAGTGT | | |
| EVL | 217838_s_at | 1277 | GATCATCGACGCCATCAGGCAGGAG | gatcatcgacgccatcaggcaggagctgagtgggatcagcaccacgtaagggg | NM_016337.1 |
| | | | | ccggcctcgctgcgctgattcgtcgagcccatccggcgacagaggacagccag | |
| | | | | aagcccagccagccccagactccagtgcaccagagcacgcacaggagcctggg | |
| | | | | cgcgctgctgtgaaacgtcctgacctgtgatcacacatgacagtgaggaaacc | |
| | | | | aagtgcaactcctgggtttttttagattctgcctgacacggaacaccaggtct | |
| | | | | gctcgtcttttttgtgttttatatttgcttatttaaggtacatttctttgggtttcta | |
| | | | | gagacgcccctaagtcacctgcttcattagacggtttccaggttttct | |
| | | 1278 | TGGGATCAGCACCACGTAAGGGGCC | | |
| | | 1279 | CCCATCCGGCGACAGAGGACAGCCA | | |
| | | 1280 | GTGCACCAGAGCACGCACAGGAGCC | | |
| | | 1281 | TGAAACGTCCTGACCTGTGATCACA | | |
| | | 1282 | GGAAACCAAGTGCAACTCCTGGGTT | | |
| | | 1283 | TCCTGGGTTTTTTTAGATTCTGCCT | | |
| | | 1284 | TAGATTCTGCCTGACACGGAACACC | | |
| | | 1285 | CTGACACGGAACACCAGGTCTGCTC | | |
| | | 1286 | GGTACATTTCTTTGGGTTTCTAGAG | | |
| | | 1287 | TCATTAGACGGTTTCCAGGTTTTCT | | |
| SMAD3 | 218284_at | 1288 | GGTGTAGTGGCTTTTTGGCTCAGCA | ggtgtagtggctttttggctcagcatccagaaacaccaaaccaggctggctaa | NM_015400.1 |
| | | | | acaagtggccgcgtgtaaaaacagacagctctgagtcaaatctgggcccttcc | |
| | | | | acaagggtcctctgaaccaagccccactcccttgctaggggtgaaagcattac | |
| | | | | agagagatggagccatctatccaagaagccttcactcaccttcactgctgctg | |
| | | | | ttgcaactcggctgttctggactctgatgtgtgtggagggatggggaatagaa | |
| | | | | cattgactgtgttgattaccttcactattcggccagcctgaccttttaataac | |
| | | | | tttgtaaaaagcatgtatgtatttatagtgttttagatttttctaacttttat | |
| | | | | atcttaaaagcagagcacctgtttaagcattgtacccctattgttaaagatttgtgt | |
| | | | | cctctcattccctctcttcctcttgtaagtgcccttctaata | |
| | | 1289 | GGCTCAGCATCCAGAAACACCAAAC | | |
| | | 1290 | GGCTGGCTAAACAAGTGGCCGCGTG | | |
| | | 1291 | CAGCTCTGAGTCAAATCTGGGCCCT | | |
| | | 1292 | CCCACTCCCTTGCTAGGGGTGAAAG | | |
| | | 1293 | GAGCCATCTATCCAAGAAGCCTTCA | | |
| | | 1294 | CTGTTCTGGACTCTGATGTGTGTGG | | |
| | | 1295 | GCCAGCCTGACCTTTTAATAACTTT | | |
| | | 1296 | GCACCTGTTTAAGCATTGTACCCCT | | |
| | | 1297 | GTTAAAGATTTGTGTCCTCTCATTC | | |
| | | 1298 | TCCTCTTGTAAGTGCCCTTCTAATA | | |
| MAPBPIP | 218291_at | 1299 | AGCCAAGCCAACACTGGAGGCGTCC | gagaggcacctcggagatctgggtgcaaaagcccagggttaggaaccgtagca | NM_014017.1 |
| | | | | tgctgcgccccaaggctttgacccaggtgctaagccaagccaacactggaggc | |
| | | | | gtccagagcaccctgctgctgaataacgagggatcactgctggcctactctgg | |
| | | | | ttacggggacactgacgcccgggtcaccgctgccatagccagtaacatctggg | |
| | | | | ccgcctacgaccggaacgggaaccaagcgtttaatgaagacaatctcaaattc | |
| | | | | atcctcatggactgcatggagggccgtgtagccatcacccgagtggccaacct | |
| | | | | tctgctgtgtatgtatgccaaggagaccgtgggctttggaatgctcaaggcca | |
| | | | | aggcccaggctttggtgcagtacctggaggagcccctcacccaagtggcggcatctt | |
| | | | | aacggcattg | |
| | | 1300 | ATAACGAGGGATCACTGCTGGCCTA | | |
| | | 1301 | CTACTCTGGTTACGGGGACACTGAC | | |
| | | 1302 | TAGCCAGTAACATCTGGGCCGCCTA | | |
| | | 1303 | AATCTCAAATTCATCCTCATGGACT | | |
| | | 1304 | TGGACTGCATGGAGGGCCGTGTAGC | | |
| | | 1305 | GAGAGGCACCTCGGAGATCTGGGTG | | |
| | | 1306 | GACCGTGGGCTTTGGAATGCTCAAG | | |
| | | 1307 | AAGTGGCGGCATCTTAACGGCATTG | | |
| | | 1308 | GGTTAGGAACCGTAGCATGCTGCGC | | |
| | | 1309 | CCAAGGCTTTGACCCAGGTGCTAAG | | |
| PGLS | 218388_at | 1310 | CCTACAGGAGCGGGAGAAGATTGTG | cctacaggagcgggagaagattgtggctcccatcagtgactccccgaagccac | NM_012088.1 |
| | | | | cgccacagcgtgtgaccctcacactacctgtcctgaatgcagcacgaactgtc | |
| | | | | atctttgtggcaactggagaaggcaaggcagctgttctgaagcgcattttgga | |
| | | | | ggaccaggaggaaaacccgctgcccgccgccctggtccagccccacaccgggaaact | |
| | | | | gtgctggttcttggacgag | |
| | | 1311 | GAAGATTGTGGCTCCCATCAGTGAC | | |
| | | 1312 | CTCACACTACCTGTCCTGAATGCAG | | |
| | | 1313 | ACCTGTCCTGAATGCAGCACGAACT | | |
| | | 1314 | CAGCACGAACTGTCATCTTTGTGGC | | |
| | | 1315 | GTGGCAACTGGAGAAGGCAAGGCAG | | |
| | | 1316 | GGCAAGGCAGCTGTTCTGAAGCGCA | | |
| | | 1317 | GGCAGCTGTTCTGAAGCGCATTTTG | | |
| | | 1318 | AAGCGCATTTTGGAGGACCAGGAGG | | |
| | | 1319 | CCCCACACCGGGAAACTGTGCTGGT | | |
| | | 1320 | GAAACTGTGCTGGTTCTTGGACGAG | | |
| SPON2 | 218638_s_at | 1321 | CTGCCCCGAGCTCGAAGAAGAGGCT | ctgccccgagctcgaagaagaggctgagtgcgtccctgataactgcgtctaag | NM_012445.1 |
| | | | | accagagccccgcagcccctggggcccccggagccatggggtgtcgggggctc | |
| | | | | ctgtgcaggctcatgctgcaggcggccgaggcacagggggtttcgcgctgctc | |
| | | | | ctgaccgcggtgaggccgcgccgaccatctctgcactgaagggccctctggtg | |
| | | | | gccggcacgggcattgggaaacagcctcctcctttcccaaccttgcttcttag | |
| | | | | gggcccccgtgtcccgtctgctctcagcctcctcctcctgcaggataaagtca | |
| | | | | tccccaaggctccagctactctaaattatggtctccttataagttattgctgc | |
| | | | | tccaggagattgtccttcatcgtccaggggcctggctcccacgtggttgcaga | |
| | | | | tacctcagacctggtgctctaggctgtgctgagcccactctcccgagggcgca | |
| | | | | tccaagcgggggccacttgagaagtgaataaatggggcggtttcggaagcgtcagtg | |
| | | | | tttccatgttatgg | |
| | | 1322 | AAGAAGAGGCTGAGTGCGTCCCTGA | | |
| | | 1323 | GTCCCTGATAACTGCGTCTAAGACC | | |
| | | 1324 | GCCGGCACGGGCATTGGGAAACAGC | | |
| | | 1325 | AGGATAAAGTCATCCCCAAGGCTCC | | |
| | | 1326 | AAGGCTCCAGCTACTCTAAATTATG | | |
| | | 1327 | CCAGGAGATTGTCCTTCATCGTCCA | | |
| | | 1328 | CTCCCACGTGGTTGCAGATACCTCA | | |
| | | 1329 | TGCAGATACCTCAGACCTGGTGCTC | | |
| | | 1330 | CATCCAAGCGGGGGCCACTTGAGAA | | |
| | | 1331 | AAGCGTCAGTGTTTCCATGTTATGG | | |
| CRTC3 | 218648_at | 1332 | CCAGTTGTGGTCCTCAGCATTTGAA | ccagttgtggtcctcagcatttgaagcagctgcatacttcagagtaaactatt | NM_022769.1 |
| | | | | tttcattatttagttttgtcacaagaaatcgaccattgtactactctcactta | |
| | | | | cagcagttaaacagcatagaactaaaaacctgtctgcatttccattttttctt | |
| | | | | tctgtatggttgtgggttttaggacatagggggttaggagaaggggtttcttg | |
| | | | | atcatgtcatgaattctcctttgtcctgtttctcctgtttcatttctcctccg | |
| | | | | cctgctgtatattacctgagctggtgttgtatcttcaagtccatatgcgtatt | |
| | | | | tgcagacctttcctgttcccactcttgttggctcttctgatttatgcacagat | |
| | | | | ggttcccagcatgtgtccagtgcttcatggatgggaccatcccagcaactaat | |
| | | | | cagacttcctgccagtgtcctaacccccagggcaccctgttcaaccatatttaaa | |
| | | 1333 | GAAATCGACCATTGTACTACTCTCA | | |
| | | 1334 | GTACTACTCTCACTTACAGCAGTTA | | |
| | | 1335 | AAAACCTGTCTGCATTTCCATTTTT | | |
| | | 1336 | GAGCTGGTGTTGTATCTTCAAGTCC | | |
| | | 1337 | TATGCGTATTTGCAGACCTTTCCTG | | |
| | | 1338 | CTCTTGTTGGCTCTTCTGATTTATG | | |
| | | 1339 | GATTTATGCACAGATGGTTCCCAGC | | |
| | | 1340 | CCCAGCATGTGTCCAGTGCTTCATG | | |
| | | 1341 | ACTAATCAGACTTCCTGCCAGTGTC | | |
| | | 1342 | GGCACCCTGTTCAACCATATTTAAA | | |
| PRKCH | 218764_at | 1343 | CACCAAGACGACTGCTTCAGCTTCT | caccaagacgactgcttcagcttcttctcttatccttactttctttaatagat | NM_024064.1 |
| | | | | atttattaaactgtccagtgaaaaggtgccacaatgcccagtattgtaaacaa | |
| | | | | caggtttgcattcatgaagctttcattcattctggagtctactaatttacctg | |
| | | | | aatggtgtttgcattctgtgaaatgcctctccacgttgcatatgtcacacttt | |
| | | | | tgtctgcacataactcttttttcacaagaagggtcactgccacaacagcacag | |
| | | | | tcagcgggtgaattacaggtgcctgctgcctgcctacctgggtaatctgatct | |
| | | | | tgtctgtatcgccgtgtgctcatcactgaagaattgcaggccactcatgtcagt | |
| | | 1344 | TCTCTTATCCTTACTTTCTTTAATA | | |
| | | 1345 | AAAGGTGCCACAATGCCCAGTATTG | | |
| | | 1346 | AGCTTTCATTCATTCTGGAGTCTAC | | |
| | | 1347 | ATTCTGTGAAATGCCTCTCCACGTT | | |
| | | 1348 | TCTCCACGTTGCATATGTCACACTT | | |
| | | 1349 | GTCTGCACATAACTCTTTTTTCACA | | |
| | | 1350 | GCCACAACAGCACAGTCAGCGGGTG | | |
| | | 1351 | GTCAGCGGGTGAATTACAGGTGCCT | | |
| | | 1352 | GTAATCTGATCTTGTCTGTATCGCC | | |
| | | 1353 | AGAATTGCAGGCCACTCATGTCAGT | | |
| CHST12 | 218927_s_at | 1354 | GACCCGCACACGGAGAAGCTGGCGC | gacccgcacacggagaagctggcgcccttcaacgagcactggcggcaggtgta | NM_018641.1 |
| | | | | ccgcctctgccacccgtgccagatcgactacgacttcgtggggaagctggaga | |
| | | | | ctctggacgaggacgccgcgcagctgctgcagctactccaggtggaccggcag | |
| | | | | ctccgcttccccccgagctaccggaacaggaccgccagcagctgggaggagga | |
| | | | | ctggttcgccaagatccccctggcctggaggcagcagctgtataaactctacg | |
| | | | | aggccgactttgttctcttcggctaccccaagcccgaaaacctcctccgagac | |
| | | | | tgaaagctttcgcgttgctttttctcgcgtgcctggaacctgacgcacgcgca | |
| | | | | ctccagtttttttatgacctacgattttgcaatctgggcttcttgttcactccactg | |
| | | | | cctctatccattgagtac | |
| | | 1355 | CACTGGCGGCAGGTGTACCGCCTCT | | |
| | | 1356 | GCCAGATCGACTACGACTTCGTGGG | | |
| | | 1357 | GCTGGAGACTCTGGACGAGGACGCC | | |
| | | 1358 | GGAGGAGGACTGGTTCGCCAAGATC | | |
| | | 1359 | TAAACTCTACGAGGCCGACTTTGTT | | |
| | | 1360 | GAAAACCTCCTCCGAGACTGAAAGC | | |
| | | 1361 | AAAGCTTTCGCGTTGCTTTTTCTCG | | |
| | | 1362 | GCGTGCCTGGAACCTGACGCACGCG | | |
| | | 1363 | TTTGCAATCTGGGCTTCTTGTTCAC | | |
| | | 1364 | TCCACTGCCTCTATCCATTGAGTAC | | |
| C16ORF68 | 218945_at | 1365 | ACTGGACTGGCTGAAGGACGACCTC | actggactggctgaaggacgacctctgcacagatcccaaggtccccttcagtt | NM_024109.1 |
| | | | | ggtcacaagaggaaatttctgacctgtacgatcacaccaccatcctgtttgca | |
| | | | | gccgaagtgttttacgacgacgacttgactgatgctgtgtttaaaacgctctc | |
| | | | | ccgactcgcccacagattgaaaaatgcctgcacagccatactgtcggtggaga | |
| | | | | agaggctcaacttcacactgagacacttggacgtcacatgtgaagcctacgat | |
| | | | | cacttccgctcctgcctgcacgcgctggagcagctcacagatggcaagctgcg | |
| | | | | cttcgtggtggagcccgtggaggcctccttcccacagctcctggtttacgagc | |
| | | | | gcctccagcagctggagctctggaagatcatcgcagaaccagtaacatgacccatcg | |
| | | | | cctccaccaggcgcggcgtctcgactgttcttagagtg | |
| | | 1366 | AATTTCTGACCTGTACGATCACACC | | |
| | | 1367 | ACCATCCTGTTTGCAGCCGAAGTGT | | |
| | | 1368 | TACGACGACGACTTGACTGATGCTG | | |
| | | 1369 | TGCTGTGTTTAAAACGCTCTCCCGA | | |
| | | 1370 | CCTGCACAGCCATACTGTCGGTGGA | | |
| | | 1371 | ATGTGAAGCCTACGATCACTTCCGC | | |
| | | 1372 | GCTCACAGATGGCAAGCTGCGCTTC | | |
| | | 1373 | TCCCACAGCTCCTGGTTTACGAGCG | | |
| | | 1374 | CAGAACCAGTAACATGACCCATCGC | | |
| | | 1375 | CGGCGTCTCGACTGTTCTTAGAGTG | | |
| TTC17 | 218972_at | 1376 | CTCCTGGGCCACAAGGGCTACTAGA | ctcctgggccacaagggctactagactggaagaccaggaaagtgccatagaca | NM_018259.1 |
| | | | | taatgtaactggatttcagcaaggcatttaacagagcctcttatgatatcctt | |
| | | | | gtgaaccagatggagagatgtgggcttgaagccttcccattgcctacaggata | |
| | | | | aaattcaaacttcctagtgtggtgtacaagaccctttacagcccgcctctgtg | |
| | | | | tacccttcaacaccattctctgaaccaaccatgctcatgtttttacctcagtg | |
| | | | | cctttgcacatgctattccctctgcctggaatgccctgtgccccctctgccct | |
| | | | | ctgccgtgctaaaatatcactcatccttaaacttcaaaatcaagtgccatctc | |
| | | | | ttccttgttaccttcaggcagaattagttactctttcctctgtgcaattgttc | |
| | | | | tatatcttcgctctagctcttttcctgttgtattgtaatgatttgtttatgtt | |
| | | | | taccttccttactagactgtgagctcaagagcaggccgtcttaattattcctttctg | |
| | | | | tacccctagtgtcttttatggttctcagccc | |
| | | 1377 | CAGAGCCTCTTATGATATCCTTGTG | | |
| | | 1378 | GATGTGGGCTTGAAGCCTTCCCATT | | |
| | | 1379 | TGGTGTACAAGACCCTTTACAGCCC | | |
| | | 1380 | TGCCCTCTGCCGTGCTAAAATATCA | | |
| | | 1381 | CTCTTCCTTGTTACCTTCAGGCAGA | | |
| | | 1382 | AGAATTAGTTACTCTTTCCTCTGTG | | |
| | | 1383 | GTGCAATTGTTCTATATCTTCGCTC | | |
| | | 1384 | TTATGTTTACCTTCCTTACTAGACT | | |
| | | 1385 | GCAGGCCGTCTTAATTATTCCTTTC | | |
| | | 1386 | TAGTGTCTTTTATGGTTCTCAGCCC | | |
| PLEKHA1 | 219024_at | 1387 | ACTCTTTGGTCTCAACCTTTACCAT | acaacgtctcgaactttctatgtgcaggctgatagccctgaagagatgcacag | NM_021622.1 |
| | | | | ttggattaaagcagtctctggcgccattgtagcacagcggggtcccggcagat | |
| | | | | ctgcgtcttctgagcatccccccggtccttcagaatccaaacacgctttccgt | |
| | | | | cctaccaacgcagccgccgccacctcacattccacagcctctcgcagcaactc | |
| | | | | tttggtctcaacctttaccatggagaagcgaggattttacgagtctcttgcca | |
| | | | | aggtcaagccagggaacttcaaggtccagactgtctctccaagagaaccagct | |
| | | | | tccaaagtgactgaacaagctctgttaagacctcaaagtaaaaatggccctca | |
| | | | | ggaaaaagattgtgacctagtagacttggacgatgcgagccttccggtcagtg | |
| | | | | acgtgtgaggcagaagcgcacggagcctgcctgcctctgccgtcctcagttacctttc | |
| | | | | atgaggcttctagcc | |
| | | 1388 | GGATTTTACGAGTCTCTTGCCAAGG | | |
| | | 1389 | TTCAAGGTCCAGACTGTCTCTCCAA | | |
| | | 1390 | TCTCTCCAAGAGAACCAGCTTCCAA | | |
| | | 1391 | AGTAGACTTGGACGATGCGAGCCTT | | |
| | | 1392 | AGCCTTCCGGTCAGTGACGTGTGAG | | |
| | | 1393 | GAGGCAGAAGCGCACGGAGCCTGCC | | |
| | | 1394 | GTTACCTTTCATGAGGCTTCTAGCC | | |
| | | 1395 | ACAACGTCTCGAACTTTCTATGTGC | | |
| | | 1396 | CTCTGGCGCCATTGTAGCACAGCGG | | |
| | | 1397 | TCAGAATCCAAACACGCTTTCCGTC | | |
| GIMAP4 | 219243_at | 1398 | TCTTCTAGATTCTCTCTATGTTGGC | tcttctagattctctctatgttggcagataatctccccttgtagcttccactc | NM_018326.1 |
| | | | | acttattcttgcattcagagtcacaatgatcatcttacccatgtggtttttga | |
| | | | | gaaagaaagatcaattctttgtttgcagtgggtaatcttagagatggagatga | |
| | | | | ttgtagaattattcctagatgagtgtcaatttatttaattccattgtcatata | |
| | | | | aggagtcaaattgtttcttatcatttgttcattgaagaacagagacctgtctg | |
| | | | | gaaaatcgatctctacaaattcaattaaataatgatccccaaatgctgaaaaa | |
| | | | | gtgaaatacagcaattcaacagataatagagcaatgtttagtatattcagctg | |
| | | | | tatctgtagaaactctttgacgaacctcaatttaaccaatttgatgaataccc | |
| | | | | agttctcttcttttctagagaaagatagttgcaacctcacctccctcactcaacactt | |
| | | | | tgaatacttattgtttggcaggtcatccacacact | |
| | | 1399 | TGTTGGCAGATAATCTCCCCTTGTA | | |
| | | 1400 | TTCCACTCACTTATTCTTGCATTCA | | |
| | | 1401 | GAGTCACAATGATCATCTTACCCAT | | |
| | | 1402 | GATCAATTCTTTGTTTGCAGTGGGT | | |
| | | 1403 | AATTGTTTCTTATCATTTGTTCATT | | |
| | | 1404 | TGTAGAAACTCTTTGACGAACCTCA | | |
| | | 1405 | TGATGAATACCCAGTTCTCTTCTTT | | |
| | | 1406 | GAAAGATAGTTGCAACCTCACCTCC | | |
| | | 1407 | CTCCCTCACTCAACACTTTGAATAC | | |
| | | 1408 | TTGTTTGGCAGGTCATCCACACACT | | |
| CENTA2 | 219358_s_at | 1409 | CCAGCTACTCCGGACACTGATGTGA | ccagctactccggacactgatgtgagaggatcacttgagccagggaggtcatg | NM_018404.1 |
| | | | | gctacagtgacccctcattgcaccactttacttagcctgggtgacagagtgag | |
| | | | | accctatctcaaaaaaaaaaaaaatctatgcattgtatgggactttcctttgg | |
| | | | | atcccccaatcaaaggataagcaatgcgtaagcctgtgtccttcctgaagctt | |
| | | | | ctcgactgcccagatagggaggtgagtcctctctatctcctctggctctggaa | |
| | | | | gcaccttgaaaatgtgcattttcaaggacacttgctgggttgtgcattaaggg | |
| | | | | ccagtttacttgtctgcctctttgaccacctgtgaactctgttgggtgtactctgcta | |
| | | | | agt | |
| | | 1410 | GGGAGGTCATGGCTACAGTGACCCC | | |
| | | 1411 | TTGCACCACTTTACTTAGCCTGGGT | | |
| | | 1412 | TATGCATTGTATGGGACTTTCCTTT | | |
| | | 1413 | AAGCAATGCGTAAGCCTGTGTCCTT | | |
| | | 1414 | TTCTCGACTGCCCAGATAGGGAGGT | | |
| | | 1415 | TAGGGAGGTGAGTCCTCTCTATCTC | | |
| | | 1416 | AAGGACACTTGCTGGGTTGTGCATT | | |
| | | 1417 | GGTTGTGCATTAAGGGCCAGTTTAC | | |
| | | 1418 | TTGACCACCTGTGAACTCTGTTGGG | | |
| | | 1419 | CTCTGTTGGGTGTACTCTGCTAAGT | | |
| SERTAD3 | 219382_at | 1420 | TTTGTTCCCATTTCAGGGTTCCACA | tgtgtttttgtgggggctcgaagcagtgactatggcctcctttgttcccattt | NM_013368.1 |
| | | | | cagggttccacaaactgtcttgcatgtgtgtgtgtgtctggttaccccgacct | |
| | | | | tctgtgaaggtgggtcttcctgaattaatttatctattccaaatgccttaacg | |
| | | | | agactctgtttctgggagtctgattttccacttacacatttcttccacctttc | |
| | | | | ctgctagttcccactcccctgtgaccactggggcctcagggaagataaagaaa | |
| | | | | gctgggcctgtcgaaggatgacagggatgtgctgccaggttgctatagaaacc | |
| | | | | caggctctgcctcttgcaccttgagggggtgggaggggctggtgtcctccctc | |
| | | | | caggctgaaccccacttcctcggcaggaccccagtctcagcagcctcctgatt | |
| | | | | tcataaccaggccggaccacgtgcaatagggtggaaaccaaactgctccatgccggg | |
| | | | | ttatttaaaagaaaggcagagtttgtggtggcttttttt | |
| | | 1421 | TCAGGGTTCCACAAACTGTCTTGCA | | |
| | | 1422 | GCCTTAACGAGACTCTGTTTCTGGG | | |
| | | 1423 | TGATTTTCCACTTACACATTTCTTC | | |
| | | 1424 | GGATGTGCTGCCAGGTTGCTATAGA | | |
| | | 1425 | GCCTCTTGCACCTTGAGGGGGTGGG | | |
| | | 1426 | TGATTTCATAACCAGGCCGGACCAC | | |
| | | 1427 | ACTGCTCCATGCCGGGTTATTTAAA | | |
| | | 1428 | GGCAGAGTTTGTGGTGGCTTTTTTT | | |
| | | 1429 | TGTGTTTTTGTGGGGGCTCGAAGCA | | |
| | | 1430 | GCTCGAAGCAGTGACTATGGCCTCC | | |
| HPSE | 219403_s_at | 1431 | ATTGGGCCTGTCAGCCCGAATGGGA | attgggcctgtcagcccgaatgggaatagaagtggtgatgaggcaagtattct | NM_006665.1 |
| | | | | ttggagcaggaaactaccatttagtggatgaaaacttcgatcctttacctgat | |
| | | | | tattggctatctcttctgttcaagaaattggtgggcaccaaggtgttaatggc | |
| | | | | aagcgtgcaaggttcaaagagaaggaagcttcgagtataccttcattgcacaa | |
| | | | | acactgacaatccaaggtataaagaaggagatttaactctgtatgccataaac | |
| | | | | ctccataatgtcaccaagtacttgcggttaccctatcctttttctaacaagca | |
| | | | | agtggataaataccttctaagacctttgggacctcatggattactttccaaat | |
| | | | | ctgtccaactcaatggtctaactctaaagatggtggatgatcaaaccttgcca | |
| | | | | cctttaatggaaaaacctctccggccaggaagttcactgggcttgccagctttctca | |
| | | | | tatagtttttttgtgataagaaatgccaaagttgctgcttgcatctga | |
| | | 1432 | GAAAACTTCGATCCTTTACCTGATT | | |
| | | 1433 | GATTATTGGCTATCTCTTCTGTTCA | | |
| | | 1434 | AGCTTCGAGTATACCTTCATTGCAC | | |
| | | 1435 | AACTCTGTATGCCATAAACCTCCAT | | |
| | | 1436 | CAAGTACTTGCGGTTACCCTATCCT | | |
| | | 1437 | GACCTTTGGGACCTCATGGATTACT | | |
| | | 1438 | GATTACTTTCCAAATCTGTCCAACT | | |
| | | 1439 | GAAGTTCACTGGGCTTGCCAGCTTT | | |
| | | 1440 | GCCAGCTTTCTCATATAGTTTTTTT | | |
| | | 1441 | TGCCAAAGTTGCTGCTTGCATCTGA | | |
| CLIC3 | 219529_at | 1442 | ACGCCAAGACAGACACGCTGCAGAT | acgccaagacagacacgctgcagatcgaggactttctggaggagacgctgggg | NM_004669.1 |
| | | | | ccgcccgacttccccagcctggcgcctcgttacagggagtccaacaccgccgg | |
| | | | | caacgacgttttccacaagttctccgcgttcatcaagaacccggtgc | |
| | | 1443 | AGACACGCTGCAGATCGAGGACTTT | | |
| | | 1444 | ACACGCTGCAGATCGAGGACTTTCT | | |
| | | 1445 | GCTGCAGATCGAGGACTTTCTGGAG | | |
| | | 1446 | CGAGGACTTTCTGGAGGAGACGCTG | | |
| | | 1447 | GCCTCGTTACAGGGAGTCCAACACC | | |
| | | 1448 | TCGTTACAGGGAGTCCAACACCGCC | | |
| | | 1449 | GCAACGACGTTTTCCACAAGTTCTC | | |
| | | 1450 | CAAGTTCTCCGCGTTCATCAAGAAC | | |
| | | 1451 | TTCTCCGCGTTCATCAAGAACCCGG | | |
| | | 1452 | TCCGCGTTCATCAAGAACCCGGTGC | | |
| PLEKHF1 | 219566_at | 1453 | TTGGTAACAAACGCCACCTTACACT | ttggtaacaaacgccaccttacactctgcaggctgcagcggcagctccagatg | NM_024310.1 |
| | | | | gcctcctgagctggacgaccccaggtctccagacatctagggaccagagcagg | |
| | | | | tttgggaacacagagggaagacaggatgggagtgtagccacagaacccacctg | |
| | | | | caccctgacaggcacaccccactgaagagcctgagtcccaggaggcctcctgg | |
| | | | | aagcccaggactgcccacccaccacgctggtgcccaccgcctggccagccaag | |
| | | | | ccctgccgatcagacatgtgggctccccgaagcccagccagagactgccgtgc | |
| | | | | tgtgggtgccaccaggcccagggactgcagcctgagctccccgaggcccaggg | |
| | | | | cagccgggtgaggactctgtcctgtgtcacctctctccaggtgtccagctgtc | |
| | | | | tcatgcctttttgtcctgtcctcagctctccgtgtggtcagcgaaaccattgttttct | |
| | | | | gttaggactcagttgcaa | |
| | | 1454 | CCCAGGTCTCCAGACATCTAGGGAC | | |
| | | 1455 | ATCTAGGGACCAGAGCAGGTTTGGG | | |
| | | 1456 | TGGGAGTGTAGCCACAGAACCCACC | | |
| | | 1457 | CAGGCACACCCCACTGAAGAGCCTG | | |
| | | 1458 | CCCACTGAAGAGCCTGAGTCCCAGG | | |
| | | 1459 | AAGCCCTGCCGATCAGACATGTGGG | | |
| | | 1460 | CAGCCAGAGACTGCCGTGCTGTGGG | | |
| | | 1461 | CTCTCCGTGTGGTCAGCGAAACCAT | | |
| | | 1462 | GTCAGCGAAACCATTGTTTTCTGTT | | |
| | | 1463 | GTTTTCTGTTAGGACTCAGTTGCAA | | |
| CLDN15 | 219640_at | 1464 | CCTCCAGGCCAAGAACTGCTCTTGG | taccccggaaccaagtacgagctgggccccgccctctacctggggtggagcgc | NM_014343.1 |
| | | | | ctcactgatctccatcctgggtggcctctgcctctgctccgcctgctgctgcg | |
| | | | | gctctgacgaggacccagccgccagcgcccggcggccctaccaggctcccgtg | |
| | | | | tccgtgatgcccgtcgccacctcggaccaagaaggcgacagcagctttggcaa | |
| | | | | atacggcagaaacgcctacgtgtagcagctctggcccgtgggccccgctgtct | |
| | | | | tcccactgccccaaggagaggggacctggccggggcccattcccctatagtaa | |
| | | | | cctcaggggccggccacgccccgctcccgtagccccgccccggccacggcccc | |
| | | | | gtgtcttgcactctcatggcccctccaggccaagaactgctcttgggaagtcg | |
| | | | | catatctcccctctgaggctggatccctcatcttctgaccctgggttctgggctgtg | |
| | | | | aaggggacggtgtccccgcacgtttgtattgtgtat | |
| | | 1465 | TCTTGGGAAGTCGCATATCTCCCCT | | |
| | | 1466 | TCATCTTCTGACCCTGGGTTCTGGG | | |
| | | 1467 | TGACCCTGGGTTCTGGGCTGTGAAG | | |
| | | 1468 | GTGAAGGGGACGGTGTCCCCGCACG | | |
| | | 1469 | GTCCCCGCACGTTTGTATTGTGTAT | | |
| | | 1470 | TACCCCGGAACCAAGTACGAGCTGG | | |
| | | 1471 | GTCGCCACCTCGGACCAAGAAGGCG | | |
| | | 1472 | GACCAAGAAGGCGACAGCAGCTTTG | | |
| | | 1473 | GAAACGCCTACGTGTAGCAGCTCTG | | |
| | | 1474 | CTTCCCACTGCCCCAAGGAGAGGGG | | |
| SIDT1 | 219734_at | 1475 | GAGAAGTTCTACATTGACCAGGCCC | gagaagttctacattgaccaggcccccttgttgcctggagtatgacgtaatca | NM_017699.1 |
| | | | | gaaaatagacgtataaatgtgcacatgcgtatgtatttgcttgtgaaattaaa | |
| | | | | gtcacctcttgcctctgctttcctgatcattcgttagagaaatggatcaggca | |
| | | | | tttttttaaattattattctttctctaaactatttgcattgtgttcaaaaacc | |
| | | | | cattttagaagtttgaacagcaagcttttcctgattttaaaaacacaaagttg | |
| | | | | ctttcaatgaaatattttgtgatttttttaaagtccccaaatgtgtacttagc | |
| | | | | cttctgttattccttattctttaagcagtgttggcttccattgaccatatgaaggcc | |
| | | | | accaattaaatggttgtg | |
| | | 1476 | CCCCTTGTTGCCTGGAGTATGACGT | | |
| | | 1477 | GTGCACATGCGTATGTATTTGCTTG | | |
| | | 1478 | CTGCTTTCCTGATCATTCGTTAGAG | | |
| | | 1479 | TGCATTGTGTTCAAAAACCCATTTT | | |
| | | 1480 | GAACAGCAAGCTTTTCCTGATTTTA | | |
| | | 1481 | GTCCCCAAATGTGTACTTAGCCTTC | | |
| | | 1482 | TACTTAGCCTTCTGTTATTCCTTAT | | |
| | | 1483 | GTTATTCCTTATTCTTTAAGCAGTG | | |
| | | 1484 | CAGTGTTGGCTTCCATTGACCATAT | | |
| | | 1485 | GAAGGCCACCAATTAAATGGTTGTG | | |
| PVRIG | 219812_at | 1486 | GCCCAGGGCCATGGAAGGACCCTTA | gctttgtctctgttgagaatggactctacgctcaggcaggggagaggcctcct | NM_024070.1 |
| | | | | cacactggtcccggcctcactcttttccctgaccctcgggggcccagggccat | |
| | | | | ggaaggacccttaggagttcgatgagagagaccatgaggccactgggctttcc | |
| | | | | ccctcccaggcctcctgggtgtcatccccttactttaattcttgggcctccaa | |
| | | | | taagtgtcccataggtgtctggccaggcccacctgctgcggatgtggtctgtg | |
| | | | | tgcgtgtgtgggcacaggtgtgagtgtgtgagtgacagttaccccatttcagtcattt | |
| | | | | cctgctgcaac | |
| | | 1487 | AGGACCCTTAGGAGTTCGATGAGAG | | |
| | | 1488 | TCATCCCCTTACTTTAATTCTTGGG | | |
| | | 1489 | TTCTTGGGCCTCCAATAAGTGTCCC | | |
| | | 1490 | TAAGTGTCCCATAGGTGTCTGGCCA | | |
| | | 1491 | GTGCGTGTGTGGGCACAGGTGTGAG | | |
| | | 1492 | TGTGAGTGACAGTTACCCCATTTCA | | |
| | | 1493 | GACAGTTACCCCATTTCAGTCATTT | | |
| | | 1494 | CATTTCAGTCATTTCCTGCTGCAAC | | |
| | | 1495 | GCTTTGTCTCTGTTGAGAATGGACT | | |
| | | 1496 | TGAGAATGGACTCTACGCTCAGGCA | | |
| GFOD1 | 219821_s_at | 1497 | GATTGATTGGGCTTCCTCATAGGAA | gattgattgggcttcctcataggaagcactgagggtgtgtctttgtacttggt | NM_018988.1 |
| | | | | tcattgcccttcacctggtagagaaagagaggtcagaaatagcaagcaaaaag | |
| | | | | caggactcccaggagccacaagaaaagagcacaggctgcaccaaagcaggggc | |
| | | | | agcagagaataaaatatccctttgaacttgtcaacaattaaaaaactgcaagg | |
| | | | | agtcaccttataacactatttccagtaaaggtggaattgagtatcagagggat | |
| | | | | tactgcggtgttaaggtagccctgccacgtggctctccaggcagggccaagaa | |
| | | | | gacagcacaaagtatgggtttggccataagctcatatgctgcccccaaagact | |
| | | | | ggggagagctgtgtgcctcagtgttgcagtgtgaattcctaaatagagggtaa | |
| | | | | agtgagcctagccaggaggtgtttggggctctatcgcgcatctctcctaccaa | |
| | | | | gctgggcaagagcttttaggagattcatccagctttgtggatttagaaaggaagcctt | |
| | | | | cagttccaatcagaatc | |
| | | 1498 | GTGTCTTTGTACTTGGTTCATTGCC | | |
| | | 1499 | TCATTGCCCTTCACCTGGTAGAGAA | | |
| | | 1500 | GTCACCTTATAACACTATTTCCAGT | | |
| | | 1501 | CTGCGGTGTTAAGGTAGCCCTGCCA | | |
| | | 1502 | TGGCTCTCCAGGCAGGGCCAAGAAG | | |
| | | 1503 | TTGGCCATAAGCTCATATGCTGCCC | | |
| | | 1504 | AGACTGGGGAGAGCTGTGTGCCTCA | | |
| | | 1505 | GTGTGCCTCAGTGTTGCAGTGTGAA | | |
| | | 1506 | CAGGAGGTGTTTGGGGCTCTATCGC | | |
| | | 1507 | GAAGCCTTCAGTTCCAATCAGAATC | | |
| LUC7L2 | 220099_s_at | 1508 | GATGCTGATCTCTTTATTCTTTCAA | gatgctgatctctttattctttcaagtaagagtgctagtgaacaaattgtgtt | NM_016007.1 |
| | | | | acttggccttgggattttttgaacgtttgtaaaatgctgtcttcctagtccaa | |
| | | | | acagctgcagctttgggcatttttctttttaattattcttcctctgactttgt | |
| | | | | atcccttaatacctacactctccaattgtaagagaaagggggcagggaagcaa | |
| | | | | tatagcttccattctaaggctgtattcccgttatgaattactagctgattaca | |
| | | | | gttcagagcattgatcctggaatgtgtgctggagaaatttaaaatactggggt | |
| | | | | tttttgtttaatggtgcctatttagagttggaagttgaacagctgttgcatta | |
| | | | | catacttttgcttttttattgaaattttgaaatcaaacgtcttgatttttctg | |
| | | | | ttctgttgaattgctatgttcaggatgttctagggggtgggggcagggactcttttcg | |
| | | | | taataag | |
| | | 1509 | AATGCTGTCTTCCTAGTCCAAACAG | | |
| | | 1510 | AGCTGCAGCTTTGGGCATTTTTCTT | | |
| | | 1511 | AATTATTCTTCCTCTGACTTTGTAT | | |
| | | 1512 | TCCTCTGACTTTGTATCCCTTAATA | | |
| | | 1513 | CTTAATACCTACACTCTCCAATTGT | | |
| | | 1514 | AAGGCTGTATTCCCGTTATGAATTA | | |
| | | 1515 | GAACAGCTGTTGCATTACATACTTT | | |
| | | 1516 | GATTTTTCTGTTCTGTTGAATTGCT | | |
| | | 1517 | GTTCAGGATGTTCTAGGGGGTGGGG | | |
| | | 1518 | GGGCAGGGACTCTTTTCGTAATAAG | | |
| MNAB | 220202_s_at | 1519 | TGGGGTGCGATTTCCAGATCTTCCC | tggggtgcgatttccagatcttcccgtacaggttaccataccacagatcctgt | NM_018835.1 |
| | | | | ccaggccactgcttcccaaggaagtgcgactaagcccatcagtgtatcagatt | |
| | | | | atgtcccttatgtcaatgctgttgattcaaggtggagttcatatggcaacgag | |
| | | | | gccacatcatcagcacactatgttgaaagggacagattcattgttactgattt | |
| | | | | atctggtcatagaaagcattccagtactggggaccttttgagccttgaacttc | |
| | | | | agcaggccaagagcaactcattacttcttcagagagaggccaatgctttggccatgc | |
| | | | | aacagaagtggaattccctggatgaaggccgtcac | |
| | | 1520 | TTCCCGTACAGGTTACCATACCACA | | |
| | | 1521 | GTGCGACTAAGCCCATCAGTGTATC | | |
| | | 1522 | TATGTCCCTTATGTCAATGCTGTTG | | |
| | | 1523 | GTGGAGTTCATATGGCAACGAGGCC | | |
| | | 1524 | GCCACATCATCAGCACACTATGTTG | | |
| | | 1525 | TACTGGGGACCTTTTGAGCCTTGAA | | |
| | | 1526 | GAGCCTTGAACTTCAGCAGGCCAAG | | |
| | | 1527 | AGAGCAACTCATTACTTCTTCAGAG | | |
| | | 1528 | CAATGCTTTGGCCATGCAACAGAAG | | |
| | | 1529 | GAATTCCCTGGATGAAGGCCGTCAC | | |
| CECR7 | 220452_x_at | 1530 | GATGAGAAAGACCTGACTGTGCCCC | gatgagaaagacctgactgtgccccagcccgacacccataaagggtctgtgct | NM_021031.1 |
| | | | | gaggtggattagtaaaagaggaaagcctcttgcagttgagatagaggaaggcc | |
| | | | | actgtctctgcctgcccctgggaactgaatgtctcggtataaaaccgattgta | |
| | | | | catttgttcaattctgagataggagaaaaccgccctatggtgggagcgagaca | |
| | | | | tgtttcgagcaatgctgccttgttattctttactccgctgagatgtttgggtg | |
| | | | | gagagaaacataaatctggcctacatgcacatccgggcatagtaccttccctt | |
| | | | | gaacttaatcatgacacagattcttttgctcacatgttttttgctgaccttct | |
| | | | | ccttattatcaccctgctgtcctactacattcctttttgctgaaataatgaaa | |
| | | | | ataatagtcaataaaaactgagggaactcaaaggccggtgccagtgcaggtcc | |
| | | | | ttggtgtgtcgaatactggtcccc | |
| | | 1531 | TAGAGGAAGGCCACTGTCTCTGCCT | | |
| | | 1532 | GCCCCTGGGAACTGAATGTCTCGGT | | |
| | | 1533 | GTGGGAGCGAGACATGTTTCGAGCA | | |
| | | 1534 | AGCAATGCTGCCTTGTTATTCTTTA | | |
| | | 1535 | ATAAATCTGGCCTACATGCACATCC | | |
| | | 1536 | AGTACCTTCCCTTGAACTTAATCAT | | |
| | | 1537 | GACACAGATTCTTTTGCTCACATGT | | |
| | | 1538 | GCTCACATGTTTTTTGCTGACCTTC | | |
| | | 1539 | TCAAAGGCCGGTGCCAGTGCAGGTC | | |
| | | 1540 | CTTGGTGTGTCGAATACTGGTCCCC | | |
| TH1L | 220607_x_at | 1541 | ACTTCCTGTTGTCAGTTACATCCGA | acttcctgttgtcagttacatccgaaagtgtctggagaagctggacactgaca | NM_016397.1 |
| | | | | tttcactcattcgctattttgtcactgaggtgctggacgtcattgctcctcct | |
| | | | | tatacctctgacttcgtgcaacttttcctccccatcctggagaatgacagcat | |
| | | | | cgcaggtaccatcaaaacggaaggcgagcatgaccctgtgacggagtttatag | |
| | | | | ctcactgcaaatctaacttcatcatggtgaactaatttagagcatcctccaga | |
| | | | | gctgaagcagaacattccagaacccgttgtggaaaaaccctttcaagaagctg | |
| | | | | ttttaagaggctcgggcagcgtcttgaaaatgggcaccgctgggaggaggtgg | |
| | | | | atgacttctttacaaaggaaaatggcaggcgctgggctcccacgacccctcag | |
| | | | | gacagatctggccgtcagccgcgggccgctgggaactccactcggggaactcctttcc | |
| | | | | aagctgacctcagttttctcac | |
| | | 1542 | GGACACTGACATTTCACTCATTCGC | | |
| | | 1543 | TCACTCATTCGCTATTTTGTCACTG | | |
| | | 1544 | GTCACTGAGGTGCTGGACGTCATTG | | |
| | | 1545 | TTTTCCTCCCCATCCTGGAGAATGA | | |
| | | 1546 | GAATGACAGCATCGCAGGTACCATC | | |
| | | 1547 | CGAGCATGACCCTGTGACGGAGTTT | | |
| | | 1548 | GAGCATCCTCCAGAGCTGAAGCAGA | | |
| | | 1549 | GCAGAACATTCCAGAACCCGTTGTG | | |
| | | 1550 | TTAAGAGGCTCGGGCAGCGTCTTGA | | |
| | | 1551 | TCCAAGCTGACCTCAGTTTTCTCAC | | |
| KLRF1 | 220646_s_at | 1552 | ATCCAGGATTTTTATTCGTCGCTTA | atattcttcataaagggaccagctaaagaaaacagctgtgctgccattaagga | NM_016523.1 |
| | | | | aagcaaaattttctctgaaacctgcagcagtgttttcaaatggatttgtcagt | |
| | | | | attagagtttgacaaaattcacagtgaaataatcaatgatcactatttttggc | |
| | | | | ctattagtttctaatattaatctccaggtgtaagattttaaagtgcaattaaa | |
| | | | | tgccaaaatctcttctcccttctccctccatcatcgacactggtctagcctca | |
| | | | | gagtaacccctgttaacaaactaaaatgtacacttcaaaatttttacgtgata | |
| | | | | gtataaaccaatgtgacttcatgtgatcatatccaggatttttattcgtcgct | |
| | | | | tattttatgccaaatgtgatcaaattatgcctgtttttctgtatcttgcgttt | |
| | | | | taaattcttaataaggtcctaaacaaaatttcttatatttctaatggttgaat | |
| | | | | tataatgtgggtttatacattttttacccttttgtcaaagagaattaactttgtttcc | |
| | | | | aggcttttgctact | |
| | | 1553 | TTATTCGTCGCTTATTTTATGCCAA | | |
| | | 1554 | AATGTGATCAAATTATGCCTGTTTT | | |
| | | 1555 | ACTTTGTTTCCAGGCTTTTGCTACT | | |
| | | 1556 | ATATTCTTCATAAAGGGACCAGCTA | | |
| | | 1557 | ACAGCTGTGCTGCCATTAAGGAAAG | | |
| | | 1558 | AAATTTTCTCTGAAACCTGCAGCAG | | |
| | | 1559 | CAATGATCACTATTTTTGGCCTATT | | |
| | | 1560 | CTCCATCATCGACACTGGTCTAGCC | | |
| | | 1561 | TAGCCTCAGAGTAACCCCTGTTAAC | | |
| | | 1562 | GTGACTTCATGTGATCATATCCAGG | | |
| TBX21 | 220684_at | 1563 | TCCTGGCCCACGATGAAACCTGAGA | tcctggcccacgatgaaacctgagaggggtgtccccttgccccatcctctgcc | NM_013351.1 |
| | | | | ctaactacagtcgtttacctggtgctgcgtcttgcttttggtttccagctgga | |
| | | | | gaaaagaagacaagaaagtcttgggcatgaaggagctttttgcatctagtggg | |
| | | | | tgggaggggtcaggtgtgggacatgggagcaggagactccactttcttccttt | |
| | | | | gtacagtaactttcaaccttttcgttggcatgtgtgttaatccctgatccaaa | |
| | | | | aagaacaaatacacgtatgttataaccatcagcccgccagggtcagggaaagg | |
| | | | | actcacctgactttggacagctggcctgggctccccctgctcaaacacagtgg | |
| | | | | ggatcagagaaaaggggctggaaaggggggaatggcccacatctcaagaagcaa | |
| | | 1564 | CTCTGCCCTAACTACAGTCGTTTAC | | |
| | | 1565 | TACAGTCGTTTACCTGGTGCTGCGT | | |
| | | 1566 | GGAGCTTTTTGCATCTAGTGGGTGG | | |
| | | 1567 | GGGGTCAGGTGTGGGACATGGGAGC | | |
| | | 1568 | AACTTTCAACCTTTTCGTTGGCATG | | |
| | | 1569 | GGCATGTGTGTTAATCCCTGATCCA | | |
| | | 1570 | CGTATGTTATAACCATCAGCCCGCC | | |
| | | 1571 | GCCCGCCAGGGTCAGGGAAAGGACT | | |
| | | 1572 | GAAAGGACTCACCTGACTTTGGACA | | |
| | | 1573 | GAATGGCCCACATCTCAAGAAGCAA | | |
| DDX47 | 220890_s_at | 1574 | AGCCCAAAGGTTTGCCCGAATGGAG | agcccaaaggtttgcccgaatggagttaagggagcatggagaaaagaagaaac | NM_016355.1 |
| | | | | gctcgcgagaggatgctggagataatgatgacacagagggtgctattggtgtc | |
| | | | | aggaacaaggtggctggaggaaaaatgaagaagcggaaaggccgttaatcact | |
| | | | | tttatgaaggctcgagttctgctgttctgtaaaagagaattggagaatgaaac | |
| | | | | ctgctccaacagagatcatgagactgaaattggtcagaattgtgtccagaatg | |
| | | | | tgctcagctaattcagtattcttccccattctgggttggagtttactgcagag | |
| | | | | taattcttacagtgctgatgtcaagactgttactgttcttcgactttgattcc | |
| | | | | ttgctcatgacatgagtagggtgtgctcttctgtcacttcacacagacctttt | |
| | | | | gccttttttagctgcaagtcaaggactaggttgatgatgcccatgacctgtaa | |
| | | | | ttgtaaagaagcttggacatctgcaaatgatatttaaaccatcttggcttgtg | |
| | | | | ctt | |
| | | 1575 | GAAACGCTCGCGAGAGGATGCTGGA | | |
| | | 1576 | GAGGGTGCTATTGGTGTCAGGAACA | | |
| | | 1577 | AATTGTGTCCAGAATGTGCTCAGCT | | |
| | | 1578 | TCAGCTAATTCAGTATTCTTCCCCA | | |
| | | 1579 | GTTACTGTTCTTCGACTTTGATTCC | | |
| | | 1580 | GACTTTGATTCCTTGCTCATGACAT | | |
| | | 1581 | CATGAGTAGGGTGTGCTCTTCTGTC | | |
| | | 1582 | CTGTCACTTCACACAGACCTTTTGC | | |
| | | 1583 | GATGATGCCCATGACCTGTAATTGT | | |
| | | 1584 | ATTTAAACCATCTTGGCTTGTGCTT | | |
| DENND2D | 221081_s_at | 1585 | TTCTCACTTTTCATCCAGGAAGCCG | ttctcacttttcatccaggaagccgagaagagcaagaatcctcctgcaggcta | NM_024901.1 |
| | | | | tttccaacagaaaatacttgaatatgaggaacagaagaaacagaagaaaccaa | |
| | | | | gggaaaaaactgtgaaataagagctgtggtgaataagaatgactagagctaca | |
| | | | | caccatttctggacttcagcccctgccagtgtggcaggatcagcaaaactgtc | |
| | | | | agctcccaaaatccatatcctcactctgagtcttggtatccaggtattgcttc | |
| | | | | aaactggtgtctgagatttggatccctggtattgatttctcaggactttggag | |
| | | | | ggctctgacaccatgctcacagaactgggctcagagctccattttttgcagag | |
| | | | | gtgacacaggtaggaaacagtagtacatgtgttgtagacacttggttagaagc | |
| | | | | tgctgcaactgccctctcccatcattataacatcttcaacacagaacacactt | |
| | | | | tgtggtcgaaaggctcagcctctctacatgaagtctg | |
| | | 1586 | AAGAGCAAGAATCCTCCTGCAGGCT | | |
| | | 1587 | GAGCTACACACCATTTCTGGACTTC | | |
| | | 1588 | GGATCAGCAAAACTGTCAGCTCCCA | | |
| | | 1589 | ATCCTCACTCTGAGTCTTGGTATCC | | |
| | | 1590 | GGTGTCTGAGATTTGGATCCCTGGT | | |
| | | 1591 | GACACCATGCTCACAGAACTGGGCT | | |
| | | 1592 | GGCTCAGAGCTCCATTTTTTGCAGA | | |
| | | 1593 | TGGTTAGAAGCTGCTGCAACTGCCC | | |
| | | 1594 | TTTGTGGTCGAAAGGCTCAGCCTCT | | |
| | | 1595 | GCTCAGCCTCTCTACATGAAGTCTG | | |
| LOC339047 | 221501_x_at | 1596 | TGATAACTCCCTGAGCCTCAAGACA | gaatggcggcagtggagcatcgtcattcttcaggattgccctactggccctac | AF229069.1 |
| | | | | ctcacagctgaaactttaaaaaacaggatgggccaccagccacctcctccaac | |
| | | | | tcaacaacattctataattgataactccctgagcctcaagacaccttccgagt | |
| | | | | gtgtgctctatccccttccaccctcagcggatgataatctcaagacacctccc | |
| | | | | gagtgtctgctcactccccttccaccctcagctctaccctcagcggatgataa | |
| | | | | tctcaagacacctgccgagtgcctgctctatccccttccaccctcagcggatg | |
| | | | | ataatctcaagacacctcccgagtgtctgctcactccccttccaccctcagctccac | |
| | | | | cctcagcggatgataatctcaagacacctcctgagtgtgtctgctca | |
| | | 1597 | AGACACCTTCCGAGTGTGTGCTCTA | | |
| | | 1598 | GAATGGCGGCAGTGGAGCATCGTCA | | |
| | | 1599 | CCTTCCACCCTCAGCGGATGATAAT | | |
| | | 1600 | TGATAATCTCAAGACACCTCCCGAG | | |
| | | 1601 | AGCTCTACCCTCAGCGGATGATAAT | | |
| | | 1602 | TAATCTCAAGACACCTGCCGAGTGC | | |
| | | 1603 | GATGATAATCTCAAGACACCTCCCG | | |
| | | 1604 | CATCGTCATTCTTCAGGATTGCCCT | | |
| | | 1605 | GCTCCACCCTCAGCGGATGATAATC | | |
| | | 1606 | GACACCTCCTGAGTGTGTCTGCTCA | | |
| PYCARD | 221666_s_at | 1607 | CTGGATGCGCTGGAGAACCTGACCG | ctggatgcgctggagaacctgaccgccgaggagctcaagaagttcaagctgca | BC004470.1 |
| | | | | ggcggccacgcaccagggctctggagccgcgccagctgggatccaggcccctc | |
| | | | | ctcagtcggcagccaagccaggcctgcactttatagaccagcaccgggctgcg | |
| | | | | cttatcgcgagggtcacaaacgttgagtggctgctggatgctctgtacgggaa | |
| | | | | ggtcctgacggatgagcagtaccaggcagtgcgggccgagcccaccaacccaa | |
| | | | | gcaagatgcggaagctcttcagtttcacaccagcctggaactggacctgcaaggact | |
| | | | | tgctcctccaggccctaagggagtcccagtcctacctggtggaggac | |
| | | 1608 | GGCCTGCACTTTATAGACCAGCACC | | |
| | | 1609 | GCGCTTATCGCGAGGGTCACAAACG | | |
| | | 1610 | GTCACAAACGTTGAGTGGCTGCTGG | | |
| | | 1611 | CTGCTGGATGCTCTGTACGGGAAGG | | |
| | | 1612 | GTACGGGAAGGTCCTGACGGATGAG | | |
| | | 1613 | TGAGCAGTACCAGGCAGTGCGGGCC | | |
| | | 1614 | TGCGGAAGCTCTTCAGTTTCACACC | | |
| | | 1615 | GGAACTGGACCTGCAAGGACTTGCT | | |
| | | 1616 | CTCCAGGCCCTAAGGGAGTCCCAGT | | |
| | | 1617 | GTCCCAGTCCTACCTGGTGGAGGAC | | |
| IMP3 | 221688_s_at | 1618 | TCAATAAATGCCCCAACTGCTTTGT | gcgcagcatggaggactttgtcacttgggtggactcgtccaagatcaagcggc | AL136913.1 |
| | | | | acgtgctagagtacaatgaggagcgcgatgacttcgatctggaagcctagcgg | |
| | | | | atctcccactttgcatggctgtcttttacagatgggaaaactgaggcctgatg | |
| | | | | ctggagattctatgagggtgctctcctcaagggtatcagacggtcgtaggttc | |
| | | | | ttaagaatttgattcatcagtggcaggccatgcatagagccacgggaggtgcg | |
| | | | | tccttgttttccaggaaatgttcttagaacttggactactgattattaattga | |
| | | | | ctgtgccttgggaaacagtgggaagtaacttggtgcagcactggggtattgtt | |
| | | | | ggactggttcaattcgtttaactcgaattcttgctcctggccgtggttaagct | |
| | | | | gtgtacagatgatggagagtttggcctcaagtttttataaactgagcgagact | |
| | | | | agtgttcaggatctcctcccttgtttaaatgtcaataaatgccccaactgctttgt | |
| | | 1619 | GCGCAGCATGGAGGACTTTGTCACT | | |
| | | 1620 | TTTGTCACTTGGGTGGACTCGTCCA | | |
| | | 1621 | GACTCGTCCAAGATCAAGCGGCACG | | |
| | | 1622 | GGAGCGCGATGACTTCGATCTGGAA | | |
| | | 1623 | CCCACTTTGCATGGCTGTCTTTTAC | | |
| | | 1624 | GAGGCCTGATGCTGGAGATTCTATG | | |
| | | 1625 | GGTGCTCTCCTCAAGGGTATCAGAC | | |
| | | 1626 | GCATAGAGCCACGGGAGGTGCGTCC | | |
| | | 1627 | CTCCTGGCCGTGGTTAAGCTGTGTA | | |
| | | 1628 | ATCTCCTCCCTTGTTTAAATGTCAA | | |
| CSPG2 | 221731_x_at | 1629 | TTTCAGCACCGATGGCCATGTAAAT | tttcagcaccgatggccatgtaaataagatgatttaatgttgattttaatcct | J02814.1 |
| | | | | gtatataaantaaaaagtncncaatgagtttngggcatatttaatgatgatta | |
| | | | | tggagccttagaggtctttaatcattggttcnggctgcttttatgtagtttag | |
| | | | | gctggaaatggtttcacttgctctttgactgtcagcaagactgaagatggctt | |
| | | | | ttcctggacagctagaaaacacaaaatcttgtaggtcattgcacctatctcag | |
| | | | | ccataggtgcagtttgcttctacatgatgctaaaggctgcgaatgggatcctg | |
| | | | | atggaactaaggactccaatgtcgaactcttctttgctgcattcctttttctt | |
| | | | | cacttacaagaaaggcctgaatggaggacttttctgtaaccaggaacattttt | |
| | | | | taggggtcaaagtgctaataattaactcaaccaggtctactttttaatggctt | |
| | | | | tcataacactaactcataaggttaccgatcaatgcatttcatacggatatagacctag | |
| | | | | ggctctggagggtgggg | |
| | | 1630 | GAAATGGTTTCACTTGCTCTTTGAC | | |
| | | 1631 | GAAGATGGCTTTTCCTGGACAGCTA | | |
| | | 1632 | TGTAGGTCATTGCACCTATCTCAGC | | |
| | | 1633 | GGTGCAGTTTGCTTCTACATGATGC | | |
| | | 1634 | GGCTGCGAATGGGATCCTGATGGAA | | |
| | | 1635 | CCAATGTCGAACTCTTCTTTGCTGC | | |
| | | 1636 | CATTCCTTTTTCTTCACTTACAAGA | | |
| | | 1637 | GGTCTACTTTTTAATGGCTTTCATA | | |
| | | 1638 | AAGGTTACCGATCAATGCATTTCAT | | |
| | | 1639 | AGACCTAGGGCTCTGGAGGGTGGGG | | |
| GNLY | 37145_at | 1640 | TCCTTGCAGCCATGCTCCTGGGCAA | tccttgcagccatgctcctgggcaacccaggtctggtcttntctcgtctgagc | M85276 |
| | | | | ccnnngtacnacgancnngcaagancccacctnnntgntgaggagaaatcctn | |
| | | | | gcccgtgncnngnccaggaggnnccnnnnnnnnnnnnnnngaccaaaacacag | |
| | | | | gnnnnnnnnnnnnnnnnnnnnnnnnnnnnnnnnnnnnnnnnnnnnnnnnnnnn | |
| | | | | nnnnnnggataagcccacccagagaagtgtttccaatgctgcgacccgggtgt | |
| | | | | gtaggacggggaggtcacgatggcgcgacgtctgcagaaatttcatgaggagg | |
| | | | | tatcagtctagagttacccagggcctcgtggccggagaaactgcccagcagat | |
| | | | | ctgtgaggacctcaggttgtgtataccttctacaggtcccctctgagccctctcacc | |
| | | | | ttgtcctgtggaagaagcacag | |
| | | 1641 | ATGCTCCTGGGCAACCCAGGTCTGG | | |
| | | 1642 | TGCTCCTGGGCAACCCAGGTCTGGT | | |
| | | 1643 | CCACCCAGAGAAGTGTTTCCAATGC | | |
| | | 1644 | CACCCAGAGAAGTGTTTCCAATGCT | | |
| | | 1645 | GAGAAGTGTTTCCAATGCTGCGACC | | |
| | | 1646 | TGTTTCCAATGCTGCGACCCGGGTG | | |
| | | 1647 | TCCAATGCTGCGACCCGGGTGTGTA | | |
| | | 1648 | CACGATGGCGCGACGTCTGCAGAAA | | |
| | | 1649 | GCGCGACGTCTGCAGAAATTTCATG | | |
| | | 1650 | GACGTCTGCAGAAATTTCATGAGGA | | |
| | | 1651 | GTATCAGTCTAGAGTTACCCAGGGC | | |
| | | 1652 | TGCCCAGCAGATCTGTGAGGACCTC | | |
| | | 1653 | ATACCTTCTACAGGTCCCCTCTGAG | | |
| | | 1654 | GCCCTCTCACCTTGTCCTGTGGAAG | | |
| | | 1655 | ACCTTGTCCTGTGGAAGAAGCACAG | | |
| TMEM161A | 43977_at | 1656 | CCTCATCTGGTGGACGGCTGCCTGC | cctcatctggtggacggctgcctgccagctgctcgccagccttttcggcctct | AI660497 |
| | | | | acttccaccagcacttggcaggctcctagctgcctgcagaccctcctggggcc | |
| | | | | ctgaggtctgttcctggggcagcgggacactagcctgccccctctgtttgcgc | |
| | | | | ccccgtgtccccagctgcaaggtggggccggactccccggcgttcccttcacc | |
| | | | | acagtgcctgacccgcggccccccttggacgccgagtttctgcctcagaactg | |
| | | | | tctctcctgggcccagcagcatgagggtcccgaggccattgtctccgaagcgt | |
| | | | | atgtgccaggtttgagtggcgagggtgatgctggctgctcttctgaacaaataaag | |
| | | 1657 | CTCATCTGGTGGACGGCTGCCTGCC | | |
| | | 1658 | TACTTCCACCAGCACTTGGCAGGCT | | |
| | | 1659 | CCAGCACTTGGCAGGCTCCTAGCTG | | |
| | | 1660 | CTTGGCAGGCTCCTAGCTGCCTGCA | | |
| | | 1661 | TCCTGGGGCCCTGAGGTCTGTTCCT | | |
| | | 1662 | CCCTGAGGTCTGTTCCTGGGGCAGC | | |
| | | 1663 | CCCGTGTCCCCAGCTGCAAGGTGGG | | |
| | | 1664 | TGGACGCCGAGTTTCTGCCTCAGAA | | |
| | | 1665 | GTTTCTGCCTCAGAACTGTCTCTCC | | |
| | | 1666 | CATTGTCTCCGAAGCGTATGTGCCA | | |
| | | 1667 | CTCCGAAGCGTATGTGCCAGGTTTG | | |
| | | 1668 | CCGAAGCGTATGTGCCAGGTTTGAG | | |
| | | 1669 | CGAGGGTGATGCTGGCTGCTCTTCT | | |
| | | 1670 | TGATGCTGGCTGCTCTTCTGAACAA | | |
| | | 1671 | TGGCTGCTCTTCTGAACAAATAAAG | | |

What is claimed is:

1. A method for treating a subject having cancer with an immunotherapeutic agent, comprising
determining expression level of at least one gene in a blood sample obtained from the subject,
wherein the at least one gene is selected from a first group of genes as listed in Table 2 and a second group of genes as listed in Table 3;
determining likelihood of clinical response of the subject to the treatment based on the expression level of the at least one gene in the blood sample,
wherein the expression level of the at least one gene selected from the first group of genes is positively correlated with the likelihood of clinical response, and
wherein the expression level of the at least one gene selected from the second group of genes is negatively correlated with the likelihood of clinical response; and
administering to the subject a therapeutically effective amount of the immunotherapeutic agent for treating the cancer.

2. The method claim 1, wherein the at least one gene is selected from IL2RB, KLRK1, G3BP, PPP1R16B, CLIC3, PRF1, SPON2, HOP, GNLY, TMEM161A, PRKCH, RUNX3, EOMES, SLC25A5, GZMB, IMP3, and ZAP70, wherein the expression level of the at least one gene is positively correlated with the likelihood of clinical response.

3. The method claim 1, wherein the at least one gene is selected from ASGR1, ASGR2, CENTA2, PGLS, MAPBPIP, STX10, C16ORF68, and RAB31, wherein the expression level of the at least one gene is negatively correlated with the likelihood of clinical response.

4. The method claim 1, wherein the expression level of at least two genes in the blood sample is determined, and wherein determining the likelihood of clinical response is based on the expression level of the at least two genes in the blood sample.

5. The method of claim 4, wherein a first gene of the at least two genes is selected from the first group of genes as listed in Table 2, and a second gene of the at least two genes is selected from the second group of genes as listed in Table 3.

6. The method of claim 5, wherein the first gene is selected from IL2RB, KLRK1, G3BP, PPP1R16B, CLIC3, PRF1, SPON2, HOP, GNLY, TMEM161A, PRKCH, RUNX3, EOMES, SLC25A5, GZMB, IMP3, and ZAP70.

7. The method of claim 5, wherein the second gene is selected from ASGR1, ASGR2, CENTA2, PGLS, MAPBPIP, STX10, C16ORF68, and RAB31.

8. The method of claim 5, wherein the first gene is IL2RB and the second gene is selected from ASGR1 and ASGR2.

9. The method of claim 8, wherein the first gene is IL2RB and the second gene is ASGR2.

10. The method of claims 4, wherein determining the likelihood of clinical response comprises
subjecting the expression level of the at least two genes to a formula to calculate a score,
wherein the formula is pre-determined by statistical analysis of (a) clinical response of a plurality of patients having the cancer to treatment with the immunotherapeutic agent and (b) the expression level of the at least two genes in pre-treatment blood samples from the plurality of patients.

11. The method of claim 10, wherein a first gene of the at least two genes is selected from the first group of genes as listed in Table 2, and a second gene of the at least two genes is selected from the second group of genes as listed in Table 3,
wherein the formula for calculating the score is
Score=−C₁*X_{first gene}+C₂*X_{second gene},
wherein X_{first gene} and X_{second gene} are normalized mRNA expression level of the first and the second gene, respectively, and C1 and C2 are each, independently, a number ranging from 0.01 to 3, and
wherein the score is negatively correlated with the likelihood of clinical response.

12. The method of claim 11, wherein C₁ ranges from 0.1 to 2, and C₂ ranges from 0.1 to 1.5.

13. The method of claim 11, wherein the first gene is IL2RB, and the second gene is ASGR2, and wherein C₁ ranges from 0.2 to 1.5, and C₂ ranges from 0.1 to 1.

14. The method of claim 11, wherein the score is compared to a predetermined threshold, wherein a score that is lower than the threshold is indicative of high likelihood of clinical response, and a score that is higher than the threshold is indicative of low likelihood of clinical response.

15. The method of any of claims 1-14, wherein the expression level of the at least one gene is measured by at least one method selected from microarray, quantitative polymerase chain reaction (qPCR), and flow cytometry.

16. The method of any one of claims 1-15, wherein the immunotherapeutic agent is an anti-CTLA4 antibody.

17. The method of claim 16, wherein the anti-CTLA4 antibody is ipilimumab.

18. The method of any one of claims 1-17, wherein the cancer is selected from melanoma, prostate cancer, lung cancer, ovarian cancer, gastric cancer, and glioblastoma.

19. The method of claim 18, wherein the cancer is advanced melanoma.

20. The method of claim 18, wherein the cancer is metastatic melanoma.

21. The method of claim 18, wherein the cancer is stage III or IV melanoma.

22. The method of claim 21, wherein the cancer is unresectable stage III or IV melanoma.

23. The method of claim 1-22, wherein determining the likelihood of clinical response is based on the gene expression level and at least one additional factor.

24. The method claim 23, wherein the at least one additional factor is selected from baseline serum LDH level and disease stage.

25. The method claim 24, wherein the at least one additional factor is baseline serum LDH level.

26. The method of any one of claims 1-25, wherein the subject is not being treated with the immunotherapeutic agent at the time the likelihood of clinical response of the subject is determined.

27. A method of predicting likelihood of clinical response of a subject having cancer o treatment with an immunotherapeutic agent, comprising:
obtaining a blood sample from the subject before the treatment,
determining expression level of at least one gene in the blood sample,
wherein the at least one gene is selected from a first group of genes as listed in Table 2 and a second group of genes as listed in Table 3;
determining likelihood of clinical response to the treatment based on the expression level of the at least one gene in the blood sample,
wherein the expression level of the at least one gene selected from the first group of genes is positively correlated with the likelihood of clinical response, and
wherein the expression level of the at least one gene selected from the second group of genes is negatively correlated with the likelihood of clinical response.

28. The method claim 27, wherein the at least one gene is selected from IL2RB, KLRK1, G3BP, PPP1R16B, CLIC3, PRF1, SPON2, HOP, GNLY, TMEM161A, PRKCH, RUNX3, EOMES, SLC25A5, GZMB, IMP3, and ZAP70, wherein the expression level of the at least one gene is positively correlated with the likelihood of clinical response.

29. The method claim 27, wherein the at least one gene is selected from ASGR1, ASGR2, CENTA2, PGLS, MAPBPIP, STX10, C16ORF68, and RAB31, wherein the expression level of the at least one gene is negatively correlated with the likelihood of clinical response.

30. The method claim 27, wherein the expression level of at least two genes in the blood sample is determined, and wherein determining the likelihood of clinical response is based on the expression level of the at least two genes in the blood sample.

31. The method of claim 30, wherein a first gene of the at least two genes is selected from the first group of genes as listed in Table 2, and a second gene of the at least two genes is selected from the second group of genes as listed in Table 3.

32. The method of claim 31, wherein the first gene is selected from IL2RB, KLRK1, G3BP, PPP1R16B, CLIC3, PRF1, SPON2, HOP, GNLY, TMEM161A, PRKCH, RUNX3, EOMES, SLC25A5, GZMB, IMP3, and ZAP70.

33. The method of claim 31, wherein the second gene is selected from ASGR1, ASGR2, CENTA2, PGLS, MAPBPIP, STX10, C16ORF68, and RAB31.

34. The method of claim 31, wherein the first gene is IL2RB and the second gene is selected from ASGR1 and ASGR2.

35. The method of claim 34, wherein the first gene is IL2RB and the second gene is ASGR2.

36. The method of claims 30, wherein determining the likelihood of clinical response comprises
subjecting the expression level of the at least two genes to a formula to calculate a score,
wherein the formula is pre-determined by statistical analysis of (a) clinical response of a plurality of patients having the cancer to treatment with the immunotherapeutic agent and (b) the expression level of the at least two genes in pre-treatment blood samples from the plurality of patients.

37. The method of claim 36, wherein a first gene of the at least two genes is selected from the first group of genes as listed in Table 2, and a second gene of the at least two genes is selected from the second group of genes as listed in Table 3,
wherein the formula for calculating the score is
Score=−C₁*X_{first gene}+C₂*X_{second gene},
wherein X_{first gene} and X_{second gene} are normalized mRNA expression level of the first and the second gene, respectively, and C1 and C2 are each, independently, a number ranging from 0.01 to 3, and
wherein the score is negatively correlated with the likelihood of clinical response.

38. The method of claim 37, wherein C₁ ranges from 0.1 to 2, and C₂ ranges from 0.1 to 1.5.

39. The method of claim 38, wherein the first gene is IL2RB, and the second gene is ASGR2, and wherein C₁ ranges from 0.2 to 1.5, and C₂ ranges from 0.1 to 1.

40. The method of claim 32, wherein the score is compared to a predetermined threshold, wherein a score that is lesser than the threshold is indicative of high likelihood of clinical response, and a score that is greater than the threshold is indicative of low likelihood of clinical response.

41. The method of any of claims 27-40, wherein the expression level of the at least one gene is measured by at least one method selected from microarray, quantitative polymerase chain reaction (qPCR), and flow cytometry.

42. The method of any one of claims 27-41, wherein the immunotherapeutic agent is an anti-CTLA4 antibody.

43. The method of claim 42, wherein the anti-CTLA4 antibody is ipilimumab.

44. The method of any one of claims 27-43, wherein the cancer is selected from melanoma, prostate cancer, lung cancer, ovarian cancer, gastric cancer, and glioblastoma.

45. The method of claim 44, wherein the cancer is advanced melanoma.

46. The method of claim 44, wherein the cancer is metastatic melanoma.

47. The method of claim 44, wherein the cancer is stage III or IV melanoma.

48. The method of claim 47, wherein the cancer is unresectable stage III or IV melanoma.

49. The method of claim 27-48, wherein determining the likelihood of clinical response is based on the gene expression level and at least one additional factor.

50. The method claim 49, wherein the at least one additional factor is selected from baseline serum LDH level and disease stage.

51. The method claim 50, wherein the at least one additional factor is baseline serum LDH level.

52. The method of any one of claims 27-51, wherein the subject is not being treated with the immunotherapeutic agent at the time the likelihood of clinical response of the subject is determined.

53. A method for treating a subject having melanoma with an ipilimumab, comprising
determining expression level of at least one gene in a blood sample obtained from the subject,
wherein the at least one gene is selected from a first group of genes as listed in Table 2 and a second group of genes as listed in Table 3;
determining likelihood of clinical response to the treatment based on the expression level of the at least one gene in the blood sample,
wherein the expression level of the at least one gene selected from the first group of genes is positively correlated with the likelihood of clinical response, and
wherein the expression level of the at least one gene selected from the second group of genes is negatively correlated with the likelihood of clinical response; and
administering to the subject a therapeutically effective amount of the ipilimumab for treating melanoma.

54. A method for treating a subject having melanoma with an ipilimumab, comprising
determining expression level of at least one gene in a blood sample obtained from the subject,
wherein the at least one gene is selected from a first group of genes as listed in Table 2 and a second group of genes as listed in Table 3;
determining likelihood of clinical response to the treatment based on the expression level of the at least one gene in the blood sample,
wherein the expression level of the at least one gene selected from the first group of genes is positively correlated with the likelihood of clinical response, and
wherein the expression level of the at least one gene selected from the second group of genes is negatively correlated with the likelihood of clinical response; and
administering to the subject a therapeutically effective amount of the ipilimumab for treating melanoma if the likelihood of clinical response is higher than a predetermined value.

55. A method for determining whether to treat a subject having cancer with a immunotherapeutic agent, comprising
obtaining a blood sample from the subject,
determining expression level of at least one gene in a blood sample obtained from the subject,
wherein the at least one gene is selected from a first group of genes as listed in Table 2 and a second group of genes as listed in Table 3;
determining likelihood of clinical response to the treatment based on the expression level of the at least one gene in the blood sample,
wherein the expression level of the at least one gene selected from the first group of genes is positively correlated with the likelihood of clinical response, and
wherein the expression level of the at least one gene selected from the second group of genes is negatively correlated with the likelihood of clinical response; and
determining whether to treat the subject having cancer with the immunotherapeutic agent based on the likelihood of clinical response.

56. A method for determining whether to treat a subject having melanoma with ipilimumab, comprising
obtaining a blood sample from the subject,
determining expression level of at least one gene in a blood sample obtained from the subject,
wherein the at least one gene is selected from a first group of genes as listed in Table 2 and a second group of genes as listed in Table 3;
determining likelihood of clinical response to the treatment based on the expression level of the at least one gene in the blood sample,
wherein the expression level of the at least one gene selected from the first group of genes is positively correlated with the likelihood of clinical response, and
wherein the expression level of the at least one gene selected from the second group of genes is negatively correlated with the likelihood of clinical response; and
determining whether to treat the subject having cancer with ipilimumab based on the likelihood of clinical response.

57. A kit comprising one or more reagents for determining expression level of at least one gene in a blood sample, wherein the at least one gene is selected from a first group of genes as listed in Table 2 and a second group of genes as listed in Table 3.

58. The kit of claim 57, wherein the one or more reagents are used to determine mRNA expression level of the at least one gene.

59. The kit of claim 57, comprising at least one polynucleotide capable of specifically hybridizing to the at least one gene.

60. The method claim 57, wherein the at least one gene is selected from IL2RB, KLRK1, G3BP, PPP1R16B, CLIC3, PRF1, SPON2, HOP, GNLY, TMEM161A, PRKCH, RUNX3, EOMES, SLC25A5, GZMB, IMP3, and ZAP70.

61. The method claim 57, wherein the at least one gene is selected from ASGR1, ASGR2, CENTA2, PGLS, MAPBPIP, STX10, C16ORF68, and RAB31.

62. The method claim 57, wherein the kit comprises one or more reagents for determining expression level of at least two genes in the blood sample.

63. The method of claim 62, wherein a first gene of the at least two genes is selected from the first group of genes as listed in Table 2, and a second gene of the at least two genes is selected from the second group of genes as listed in Table 3.

64. The method of claim 63, wherein the first gene is selected from IL2RB, KLRK1, G3BP, PPP1R16B, CLIC3, PRF1, SPON2, HOP, GNLY, TMEM161A, PRKCH, RUNX3, EOMES, SLC25A5, GZMB, IMP3, and ZAP70.

65. The method of claim 63, wherein the second gene is selected from ASGR1, ASGR2, CENTA2, PGLS, MAPBPIP, STX10, C16ORF68, and RAB31.

66. The method of claim 63, wherein the first gene is IL2RB and the second gene is selected from ASGR1 and ASGR2.

67. The method of claim 66, wherein the first gene is IL2RB and the second gene is ASGR2.

68. A method for treating a subject having cancer with an immunotherapeutic agent, comprising
determining expression levels of a first gene and a second gene in a blood sample obtained from the subject,
wherein the first gene is IL2RB and a second gene is selected from ASGR1 and ASGR2;
determining likelihood of longer overall survival of the subject following the treatment based on the expression levels of the first gene and the second gene in the blood sample,
wherein the expression levels of the first gene and the second gene are used to calculate a score according to formula:
Score=−C₁*X_{first gene}+C₂*X_{second gene},
wherein X_{first gene} and X_{second gene} are normalized mRNA expression levels of the first and the second gene, respectively, and C1 and C2 are each, independently, a number ranging from 0.01 to 3,
wherein the score is negatively correlated with the likelihood of longer overall survival;
administering to the subject a therapeutically effective amount of the immunotherapeutic agent for treating the cancer.

69. The method of claim 68, wherein C₁ ranges from 0.1 to 2, and C₂ ranges from 0.1 to 1.5.

70. The method of claim 68, wherein the first gene is IL2RB, and the second gene is ASGR2, and wherein C₁ ranges from 0.2 to 1.5, and C₂ ranges from 0.1 to 1.

71. The method of claim 68, wherein the score is compared to a predetermined threshold, wherein a score that is lower than the threshold is indicative of high likelihood of longer overall survival, and a score that is higher than the threshold is indicative of low likelihood of longer overall survival.

72. The method of any of claims 68-71, wherein the expression level of the at least one gene is measured by at least one method selected from microarray and quantitative polymerase chain reaction (qPCR).

73. The method of any one of claims 68-72, wherein the immunotherapeutic agent is an anti-CTLA4 antibody.

74. The method of claim 73, wherein the anti-CTLA4 antibody is ipilimumab.

75. The method of any one of claims 68-74, wherein the cancer is selected from melanoma, prostate cancer, lung cancer, ovarian cancer, gastric cancer, and glioblastoma.

76. The method of claim 75, wherein the cancer is advanced melanoma.

77. The method of claim 75, wherein the cancer is metastatic melanoma.

78. The method of claim 75, wherein the cancer is stage III or IV melanoma.

79. The method of claim 78, wherein the cancer is unresectable stage III or IV melanoma.

80. The method of claim 68-79, wherein determining the likelihood of clinical response is based on the gene expression level and at least one additional factor.

81. The method claim 80, wherein the at least one additional factor is selected from baseline serum LDH level and disease stage.

82. The method claim 80, wherein the at least one additional factor is baseline serum LDH level.

83. The method of any one of claims 68-82, wherein the subject is not being treated with the immunotherapeutic agent at the time the likelihood of clinical response of the subject is determined.

84. A method of predicting likelihood of longer overall survival of a subject having cancer to treatment with an immunotherapeutic agent, comprising:
obtaining a blood sample from the subject before the treatment,
determining expression levels of a first gene and a second gene in the blood sample obtained from the subject,
wherein the first gene is IL2RB and a second gene is selected from ASGR1 and ASGR2;
determining likelihood of longer overall survival of the subject following the treatment based on the expression levels of the first gene and the second gene in the blood sample,
wherein the expression levels of the first gene and the second gene are used to calculate a score according to formula:
Score=−C₁*X_{first gene}+C₂*X_{second gene},
wherein X_{first gene} and X_{second gene} are normalized mRNA expression levels of the first and the second gene, respectively, and C1 and C2 are each, independently, a number ranging from 0.01 to 3,
wherein the score is negatively correlated with the likelihood of longer overall survival.

85. The method of claim 84, wherein C₁ ranges from 0.1 to 2, and C₂ ranges from 0.1 to 1.5.

86. The method of claim 84, wherein the first gene is IL2RB, and the second gene is ASGR2, and wherein C₁ ranges from 0.2 to 1.5, and C₂ ranges from 0.1 to 1.

87. The method of claim 84, wherein the score is compared to a predetermined threshold, wherein a score that is lower than the threshold is indicative of high likelihood of longer overall survival, and a score that is higher than the threshold is indicative of low likelihood of longer overall survival.

88. The method of any of claims 84-87, wherein the expression level of the at least one gene is measured by at least one method selected from microarray and quantitative polymerase chain reaction (qPCR).

89. The method of any one of claims 84-88, wherein the immunotherapeutic agent is an anti-CTLA4 antibody.

90. The method of claim 89, wherein the anti-CTLA4 antibody is ipilimumab.

91. The method of any one of claims 84-90, wherein the cancer is selected from melanoma, prostate cancer, lung cancer, ovarian cancer, gastric cancer, and glioblastoma.

92. The method of claim 91, wherein the cancer is advanced melanoma.

93. The method of claim 91, wherein the cancer is metastatic melanoma.

94. The method of claim 91, wherein the cancer is stage III or IV melanoma.

95. The method of claim 94, wherein the cancer is unresectable stage III or IV melanoma.

96. The method of claim 84-95, wherein determining the likelihood of clinical response is based on the gene expression level and at least one additional factor.

97. The method claim 96, wherein the at least one additional factor is selected from baseline serum LDH level and disease stage.

98. The method claim 96, wherein the at least one additional factor is baseline serum LDH level.

99. The method of any one of claims 84-98, wherein the subject is not being treated with the immunotherapeutic agent at the time the likelihood of clinical response of the subject is determined.

The application's sequence listing, which the Patent Office published only in electronic form, follows.

SEQUENCE LISTING (1822 sequences)

SEQ ID NO: 1 - DNA, 25 bp, Artificial Sequence
  source: /note="Description of Artificial Sequence: Synthetic probe"
tcatcatgattggtaccctgactgc

SEQ ID NO: 2 - DNA, 25 bp, Artificial Sequence
  source: /note="Description of Artificial Sequence: Synthetic probe"
gtaccctgactgcactacagtggtt

SEQ ID NO: 3 - DNA, 25 bp, Artificial Sequence
  source: /note="Description of Artificial Sequence: Synthetic probe"
gtggtttatctatgactccgtgaag

SEQ ID NO: 4 - DNA, 25 bp, Artificial Sequence
  source: /note="Description of Artificial Sequence: Synthetic probe"
gtgaaggtctacttcagacttcctc

SEQ ID NO: 5 - DNA, 25 bp, Artificial Sequence
  source: /note="Description of Artificial Sequence: Synthetic probe"
acaccatgatgaagttcgcctgctt

SEQ ID NO: 6 - DNA, 25 bp, Artificial Sequence
  source: /note="Description of Artificial Sequence: Synthetic probe"
tcgcctgctttgaacgtactgttga

SEQ ID NO: 7 - DNA, 25 bp, Artificial Sequence
  source: /note="Description of Artificial Sequence: Synthetic probe"
tgtacaagtttgtggttcctaagcc

SEQ ID NO: 8 - DNA, 25 bp, Artificial Sequence
  source: /note="Description of Artificial Sequence: Synthetic probe"
tcctaagccccgcagtgaatgttca

SEQ ID NO: 9 - DNA, 25 bp, Artificial Sequence
  source: /note="Description of Artificial Sequence: Synthetic probe"
accctgctgattctgtggtatctgt

SEQ ID NO: 10 - DNA, 25 bp, Artificial Sequence
  source: /note="Description of Artificial Sequence: Synthetic probe"
aaaggtagcagtgcttctctggtcc

SEQ ID NO: 11 - DNA, 25 bp, Artificial Sequence
  source: /note="Description of Artificial Sequence: Synthetic probe"
gtgcttctctggtcctcaagagact

SEQ ID NO: 12 - DNA, 25 bp, Artificial Sequence
  source: /note="Description of Artificial Sequence: Synthetic probe"
gccccagagaaactgccacatacac

SEQ ID NO: 13 - DNA, 25 bp, Artificial Sequence
  source: /note="Description of Artificial Sequence: Synthetic probe"
gctccattcactcccaggtgagaat

SEQ ID NO: 14 - DNA, 25 bp, Artificial Sequence
  source: /note="Description of Artificial Sequence: Synthetic probe"
ggcaaacgtccacaaaggtcacagg

SEQ ID NO: 15 - DNA, 25 bp, Artificial Sequence
  source: /note="Description of Artificial Sequence: Synthetic probe"
aggtcacaggcagcgtacatacggt

SEQ ID NO: 16 - DNA, 25 bp, Artificial Sequence
  source: /note="Description of Artificial Sequence: Synthetic probe"
catacggttctgttataccccatat

SEQ ID NO: 17 - DNA, 25 bp, Artificial Sequence
  source: /note="Description of Artificial Sequence: Synthetic probe"
tattaccccttcatgtcctaaagaa

SEQ ID NO: 18 - DNA, 25 bp, Artificial Sequence
  source: /note="Description of Artificial Sequence: Synthetic probe"
aaatcttgtgttaacttgcctccat

SEQ ID NO: 19 - DNA, 25 bp, Artificial Sequence
  source: /note="Description of Artificial Sequence: Synthetic probe"
ggaatgacccttttgtgtctatgat

SEQ ID NO: 20 - DNA, 25 bp, Artificial Sequence
  source: /note="Description of Artificial Sequence: Synthetic probe"
cacagcttttcttgataggcctagt

SEQ ID NO: 21 - DNA, 25 bp, Artificial Sequence
  source: /note="Description of Artificial Sequence: Synthetic probe"
tgacagtagctcttagactcgccta

SEQ ID NO: 22 - DNA, 25 bp, Artificial Sequence
  source: /note="Description of Artificial Sequence: Synthetic probe"
ggtgtactgtgtttgatttgtctca

SEQ ID NO: 23 - DNA, 25 bp, Artificial Sequence
  source: /note="Description of Artificial Sequence: Synthetic probe"
cagggaaaagtgaggctcttggggg

SEQ ID NO: 24 - DNA, 25 bp, Artificial Sequence
  source: /note="Description of Artificial Sequence: Synthetic probe"
ttacctgggagcacacttttccctt

SEQ ID NO: 25 - DNA, 25 bp, Artificial Sequence
  source: /note="Description of Artificial Sequence: Synthetic probe"
ccttccccgatgacctgggatggtg

SEQ ID NO: 26 - DNA, 25 bp, Artificial Sequence
  source: /note="Description of Artificial Sequence: Synthetic probe"
ccccgatgacctgggatggtggcca

SEQ ID NO: 27 - DNA, 25 bp, Artificial Sequence
  source: /note="Description of Artificial Sequence: Synthetic probe"
cccaccactgtactctgaaattggc

SEQ ID NO: 28 - DNA, 25 bp, Artificial Sequence
  source: /note="Description of Artificial Sequence: Synthetic probe"
cactgtactctgaaattggcgagtg

SEQ ID NO: 29 - DNA, 25 bp, Artificial Sequence
  source: /note="Description of Artificial Sequence: Synthetic probe"
ccgttcatggtggtctttcaggtta

SEQ ID NO: 30 - DNA, 25 bp, Artificial Sequence
  source: /note="Description of Artificial Sequence: Synthetic probe"
ggtggtctttcaggttatcttggca

SEQ ID NO: 31 - DNA, 25 bp, Artificial Sequence
  source: /note="Description of Artificial Sequence: Synthetic probe"
ggtctttcaggttatcttggcaaca

SEQ ID NO: 32 - DNA, 25 bp, Artificial Sequence
  source: /note="Description of Artificial Sequence: Synthetic probe"
tcaggttatcttggcaacatgtaca

SEQ ID NO: 33 - DNA, 25 bp, Artificial Sequence
  source: /note="Description of Artificial Sequence: Synthetic probe"
atgacattgtgtttgtactttgttg

SEQ ID NO: 34 - DNA, 25 bp, Artificial Sequence
  source: /note="Description of Artificial Sequence: Synthetic probe"
aatagacttgtgtcttcaccttgct

SEQ ID NO: 35 - DNA, 25 bp, Artificial Sequence
  source: /note="Description of Artificial Sequence: Synthetic probe"
gtcttcaccttgctgcattgtgacc

SEQ ID NO: 36 - DNA, 25 bp, Artificial Sequence
  source: /note="Description of Artificial Sequence: Synthetic probe"
gtgaccagcacctacggctggacag

SEQ ID NO: 37 - DNA, 25 bp, Artificial Sequence
  source: /note="Description of Artificial Sequence: Synthetic probe"
gagcggatcatgaaagcccaggcac

SEQ ID NO: 38 - DNA, 25 bp, Artificial Sequence
  source: /note="Description of Artificial Sequence: Synthetic probe"
aaaagcacctggagatcaaccctga

SEQ ID NO: 39 - DNA, 25 bp, Artificial Sequence
  source: /note="Description of Artificial Sequence: Synthetic probe"
tggtggtgctgctgtttgaaaccgc

SEQ ID NO: 40 - DNA, 25 bp, Artificial Sequence
  source: /note="Description of Artificial Sequence: Synthetic probe"
caaccgcatctatcgcatgatcaag

SEQ ID NO: 41 - DNA, 25 bp, Artificial Sequence
  source: /note="Description of Artificial Sequence: Synthetic probe"
gcagaggaacccaatgctgcagttc

SEQ ID NO: 42 - DNA, 25 bp, Artificial Sequence
  source: /note="Description of Artificial Sequence: Synthetic probe"
tcccccctctcgagggcgatgagga

SEQ ID NO: 43 - DNA, 25 bp, Artificial Sequence
  source: /note="Description of Artificial Sequence: Synthetic probe"
gggcgatgaggatgcgtctcgcatg

SEQ ID NO: 44 - DNA, 25 bp, Artificial Sequence
  source: /note="Description of Artificial Sequence: Synthetic probe"
aacttgtgcccttgtatagtgtccc

SEQ ID NO: 45 - DNA, 25 bp, Artificial Sequence
  source: /note="Description of Artificial Sequence: Synthetic probe"
taacacaatcttgagcattcttgac

SEQ ID NO: 46 - DNA, 25 bp, Artificial Sequence
  source: /note="Description of Artificial Sequence: Synthetic probe"
cattcttgacagactcctggctgtc

SEQ ID NO: 47 - DNA, 25 bp, Artificial Sequence
  source: /note="Description of Artificial Sequence: Synthetic probe"
tggctgtcagtttctcagtggcaac

SEQ ID NO: 48 - DNA, 25 bp, Artificial Sequence
  source: /note="Description of Artificial Sequence: Synthetic probe"
cctacttcggtatctatgacactgc

SEQ ID NO: 49 - DNA, 25 bp, Artificial Sequence
  source: /note="Description of Artificial Sequence: Synthetic probe"
gggaatgcttccggatcccaagaac

SEQ ID NO: 50 - DNA, 25 bp, Artificial Sequence
  source: /note="Description of Artificial Sequence: Synthetic probe"
caagaacactcacatcgtcatcagc

SEQ ID NO: 51 - DNA, 25 bp, Artificial Sequence
  source: /note="Description of Artificial Sequence: Synthetic probe"
atgatcgcacagactgtcactgctg

SEQ ID NO: 52 - DNA, 25 bp, Artificial Sequence
  source: /note="Description of Artificial Sequence: Synthetic probe"
gctggcggaagattgctcgtgatga

SEQ ID NO: 53 - DNA, 25 bp, Artificial Sequence
  source: /note="Description of Artificial Sequence: Synthetic probe"
gggtgcatggtccaatgttctcaga

SEQ ID NO: 54 - DNA, 25 bp, Artificial Sequence
  source: /note="Description of Artificial Sequence: Synthetic probe"
gaggcatgggtggtgcttttgtgct

SEQ ID NO: 55 - DNA, 25 bp, Artificial Sequence
  source: /note="Description of Artificial Sequence: Synthetic probe"
tgcttttgtgcttgtcttgtatgat

SEQ ID NO: 56 - DNA, 25 bp, Artificial Sequence
  source: /note="Description of Artificial Sequence: Synthetic probe"
cgtagccctcacgtgggtgtgaagg

SEQ ID NO: 57 - DNA, 25 bp, Artificial Sequence
  source: /note="Description of Artificial Sequence: Synthetic probe"
gaaggacacttctgccatgataacc

SEQ ID NO: 58 - DNA, 25 bp, Artificial Sequence
  source: /note="Description of Artificial Sequence: Synthetic probe"
tgccatgataaccagacctgctgcc

SEQ ID NO: 59 - DNA, 25 bp, Artificial Sequence
  source: /note="Description of Artificial Sequence: Synthetic probe"
gccgagacaaccgacagggctgggc

SEQ ID NO: 60 - DNA, 25 bp, Artificial Sequence
  source: /note="Description of Artificial Sequence: Synthetic probe"
gccaggggtaccaagtgtttgcgca

SEQ ID NO: 61 - DNA, 25 bp, Artificial Sequence
  source: /note="Description of Artificial Sequence: Synthetic probe"
gacccagccttgagacagctgctgt

SEQ ID NO: 62 - DNA, 25 bp, Artificial Sequence
  source: /note="Description of Artificial Sequence: Synthetic probe"
cagtactgaagactctgcagccctc

SEQ ID NO: 63 - DNA, 25 bp, Artificial Sequence
  source: /note="Description of Artificial Sequence: Synthetic probe"
tgagctccccatcaccatgggaggt

SEQ ID NO: 64 - DNA, 25 bp, Artificial Sequence
  source: /note="Description of Artificial Sequence: Synthetic probe"
tggggcctcaatctaaggccttccc

SEQ ID NO: 65 - DNA, 25 bp, Artificial Sequence
  source: /note="Description of Artificial Sequence: Synthetic probe"
aaagccacattacaagctgccatcc

SEQ ID NO: 66 - DNA, 25 bp, Artificial Sequence
  source: /note="Description of Artificial Sequence: Synthetic probe"
gtgtgtgcgcgtgtgcgtttcaata

SEQ ID NO: 67 - DNA, 25 bp, Artificial Sequence
  source: /note="Description of Artificial Sequence: Synthetic probe"
gccattacagtatccaatgtctttt

SEQ ID NO: 68 - DNA, 25 bp, Artificial Sequence
  source: /note="Description of Artificial Sequence: Synthetic probe"
gtttagttcttaactgctggccaac

SEQ ID NO: 69 - DNA, 25 bp, Artificial Sequence
  source: /note="Description of Artificial Sequence: Synthetic probe"
cttacatccccagcaaatcatcggg

SEQ ID NO: 70 - DNA, 25 bp, Artificial Sequence
  source: /note="Description of Artificial Sequence: Synthetic probe"
tatgttcatcacccttatatcatgt

SEQ ID NO: 71 - DNA, 25 bp, Artificial Sequence
  source: /note="Description of Artificial Sequence: Synthetic probe"
ttatatcatgtacctcagatctctc

SEQ ID NO: 72 - DNA, 25 bp, Artificial Sequence
  source: /note="Description of Artificial Sequence: Synthetic probe"
tctcctctctctcagttatatagtt

SEQ ID NO: 73 - DNA, 25 bp, Artificial Sequence
  source: /note="Description of Artificial Sequence: Synthetic probe"
gtgtgatgccatatcaagtccatgt

SEQ ID NO: 74 - DNA, 25 bp, Artificial Sequence
  source: /note="Description of Artificial Sequence: Synthetic probe"
agtccatgttattctctcacagtgt

SEQ ID NO: 75 - DNA, 25 bp, Artificial Sequence
  source: /note="Description of Artificial Sequence: Synthetic probe"
ggtgtgggtgtctgtttggtcagga

SEQ ID NO: 76 - DNA, 25 bp, Artificial Sequence
  source: /note="Description of Artificial Sequence: Synthetic probe"
atgttgtattggctatgatggtgac

SEQ ID NO: 77 - DNA, 25 bp, Artificial Sequence
  source: /note="Description of Artificial Sequence: Synthetic probe"
taagaggtcttatctgttcagtgtt

SEQ ID NO: 78 - DNA, 25 bp, Artificial Sequence
  source: /note="Description of Artificial Sequence: Synthetic probe"
gtgttctcctactgcaaatattttc

SEQ ID NO: 79 - DNA, 25 bp, Artificial Sequence
  source: /note="Description of Artificial Sequence: Synthetic probe"
ggttttctcttcatgtaagtccttg

SEQ ID NO: 80 - DNA, 25 bp, Artificial Sequence
  source: /note="Description of Artificial Sequence: Synthetic probe"
tgttcttagcactttaattcctgtc

SEQ ID NO: 81 - DNA, 25 bp, Artificial Sequence
  source: /note="Description of Artificial Sequence: Synthetic probe"
gctgaaactggtctactgtgtctct

SEQ ID NO: 82 - DNA, 25 bp, Artificial Sequence
  source: /note="Description of Artificial Sequence: Synthetic probe"
gaaagggttgctgctgtcagccttg

SEQ ID NO: 83 - DNA, 25 bp, Artificial Sequence
  source: /note="Description of Artificial Sequence: Synthetic probe"
caaccctgtgatcagaacctccaaa

SEQ ID NO: 84 - DNA, 25 bp, Artificial Sequence
  source: /note="Description of Artificial Sequence: Synthetic probe"
agatagggatattggcccctcactg

SEQ ID NO: 85 - DNA, 25 bp, Artificial Sequence
  source: /note="Description of Artificial Sequence: Synthetic probe"
cactctcagccatagcactttgttc

SEQ ID NO: 86 - DNA, 25 bp, Artificial Sequence
  source: /note="Description of Artificial Sequence: Synthetic probe"
actttgttcactgtcctgtgtcaga

SEQ ID NO: 87 - DNA, 25 bp, Artificial Sequence
  source: /note="Description of Artificial Sequence: Synthetic probe"
tgtgtcagagcactgagctccaccc

SEQ ID NO: 88 - DNA, 25 bp, Artificial Sequence
  source: /note="Description of Artificial Sequence: Synthetic probe"
agctccacccttttctgagagttat

SEQ ID NO: 89 - DNA, 25 bp, Artificial Sequence
  source: /note="Description of Artificial Sequence: Synthetic probe"
gcagaagatgggcctccagaactcc

SEQ ID NO: 90 - DNA, 25 bp, Artificial Sequence
  source: /note="Description of Artificial Sequence: Synthetic probe"
tattcatggaggacacactgctaag

SEQ ID NO: 91 - DNA, 25 bp, Artificial Sequence
  source: /note="Description of Artificial Sequence: Synthetic probe"
ttagctggaaccccaatgagccttg

SEQ ID NO: 92 - DNA, 25 bp, Artificial Sequence
  source: /note="Description of Artificial Sequence: Synthetic probe"
agccttgggtcatttgctcagtgtc

SEQ ID NO: 93 - DNA, 25 bp, Artificial Sequence
  source: /note="Description of Artificial Sequence: Synthetic probe"
gtcacgacatccgaactggagggac

SEQ ID NO: 94 - DNA, 25 bp, Artificial Sequence
  source: /note="Description of Artificial Sequence: Synthetic probe"
tggggtggcttatggcttctttatc

SEQ ID NO: 95 - DNA, 25 bp, Artificial Sequence
  source: /note="Description of Artificial Sequence: Synthetic probe"
ttatcctctgattctagcactttca

SEQ ID NO: 96 - DNA, 25 bp, Artificial Sequence
  source: /note="Description of Artificial Sequence: Synthetic probe"
gtgagctgttgcgtactgtatcata

SEQ ID NO: 97 - DNA, 25 bp, Artificial Sequence
  source: /note="Description of Artificial Sequence: Synthetic probe"
gtagcagggtattgcctttgattca

SEQ ID NO: 98 - DNA, 25 bp, Artificial Sequence
  source: /note="Description of Artificial Sequence: Synthetic probe"
caactgttttaagtcctcattttct

SEQ ID NO: 99 - DNA, 25 bp, Artificial Sequence
  source: /note="Description of Artificial Sequence: Synthetic probe"
tttctcaaactaagtgcttgctgtt

SEQ ID NO: 100 - DNA, 25 bp, Artificial Sequence
  source: /note="Description of Artificial Sequence: Synthetic probe"
aaacctggagagtgccttcgagtgc

SEQ ID NO: 101 - DNA, 25 bp, Artificial Sequence
  source: /note="Description of Artificial Sequence: Synthetic probe"
gtgccttcgagtgcgaggcgaggtg

SEQ ID NO: 102 - DNA, 25 bp, Artificial Sequence
  source: /note="Description of Artificial Sequence: Synthetic probe"
ctcctgacgctaagagcttcgtgct

SEQ ID NO: 103 - DNA, 25 bp, Artificial Sequence
  source: /note="Description of Artificial Sequence: Synthetic probe"
gcttcgtgctgaacctgggcaaaga

SEQ ID NO: 104 - DNA, 25 bp, Artificial Sequence
  source: /note="Description of Artificial Sequence: Synthetic probe"
tgtgcaacagcaaggacggcggggc

SEQ ID NO: 105 - DNA, 25 bp, Artificial Sequence
  source: /note="Description of Artificial Sequence: Synthetic probe"
accgagcagcgggaggctgtctttc

SEQ ID NO: 106 - DNA, 25 bp, Artificial Sequence
  source: /note="Description of Artificial Sequence: Synthetic probe"
gaccgtcaagctgccagatggatac

SEQ ID NO: 107 - DNA, 25 bp, Artificial Sequence
  source: /note="Description of Artificial Sequence: Synthetic probe"
acatggcagctgacggtgacttcaa

SEQ ID NO: 108 - DNA, 25 bp, Artificial Sequence
  source: /note="Description of Artificial Sequence: Synthetic probe"
ctcctggactcaatcatggcttgtg

SEQ ID NO: 109 - DNA, 25 bp, Artificial Sequence
  source: /note="Description of Artificial Sequence: Synthetic probe"
atcatggcttgtggtctggtcgcca

SEQ ID NO: 110 - DNA, 25 bp, Artificial Sequence
  source: /note="Description of Artificial Sequence: Synthetic probe"
gtcgccagcaacctgaatctcaaac

SEQ ID NO: 111 - DNA, 25 bp, Artificial Sequence
  source: /note="Description of Artificial Sequence: Synthetic probe"
acagtcctgcttagagcccttaaaa

SEQ ID NO: 112 - DNA, 25 bp, Artificial Sequence
  source: /note="Description of Artificial Sequence: Synthetic probe"
ggactcagtttaccttaatgcctta

SEQ ID NO: 113 - DNA, 25 bp, Artificial Sequence
  source: /note="Description of Artificial Sequence: Synthetic probe"
taaatcctacctagagacctttgtt

SEQ ID NO: 114 - DNA, 25 bp, Artificial Sequence
  source: /note="Description of Artificial Sequence: Synthetic probe"
aactgacaactctttgtagtcctcc

SEQ ID NO: 115 - DNA, 25 bp, Artificial Sequence
  source: /note="Description of Artificial Sequence: Synthetic probe"
gggaggtggcagttatgctgttact

SEQ ID NO: 116 - DNA, 25 bp, Artificial Sequence
  source: /note="Description of Artificial Sequence: Synthetic probe"
tgcctcagatctgctgtagccagtg

SEQ ID NO: 117 - DNA, 25 bp, Artificial Sequence
  source: /note="Description of Artificial Sequence: Synthetic probe"
gctgtagccagtgcagacctcactg

SEQ ID NO: 118 - DNA, 25 bp, Artificial Sequence
  source: /note="Description of Artificial Sequence: Synthetic probe"
ctccaggtggcctggtgactccatg

SEQ ID NO: 119 - DNA, 25 bp, Artificial Sequence
  source: /note="Description of Artificial Sequence: Synthetic probe"
ccatgatggacgatcttgctcccag

SEQ ID NO: 120 - DNA, 25 bp, Artificial Sequence
  source: /note="Description of Artificial Sequence: Synthetic probe"
ggggaagagttgtacgcccaggcaa

SEQ ID NO: 121 - DNA, 25 bp, Artificial Sequence
  source: /note="Description of Artificial Sequence: Synthetic probe"
gcttgcgtggctgtttcatgaccgc

SEQ ID NO: 122 - DNA, 25 bp, Artificial Sequence
  source: /note="Description of Artificial Sequence: Synthetic probe"
gtatagctttgggccatgtagcatt

SEQ ID NO: 123 - DNA, 25 bp, Artificial Sequence
  source: /note="Description of Artificial Sequence: Synthetic probe"
aaattattaatctgttgctgactct

SEQ ID NO: 124 - DNA, 25 bp, Artificial Sequence
  source: /note="Description of Artificial Sequence: Synthetic probe"
gttgctgactcttaattcctatttc

SEQ ID NO: 125 - DNA, 25 bp, Artificial Sequence
  source: /note="Description of Artificial Sequence: Synthetic probe"
gtgtatgacagctttccttcacaca

SEQ ID NO: 126 - DNA, 25 bp, Artificial Sequence
  source: /note="Description of Artificial Sequence: Synthetic probe"
tccttcacacactatttttgtgggt

SEQ ID NO: 127 - DNA, 25 bp, Artificial Sequence
  source: /note="Description of Artificial Sequence: Synthetic probe"
gactttctgcctgttacatttttgc

SEQ ID NO: 128 - DNA, 25 bp, Artificial Sequence
  source: /note="Description of Artificial Sequence: Synthetic probe"
gtgttttccactagtatatccctgt

SEQ ID NO: 129 - DNA, 25 bp, Artificial Sequence
  source: /note="Description of Artificial Sequence: Synthetic probe"
tccctgttgatttgtttgtgccttt

SEQ ID NO: 130 - DNA, 25 bp, Artificial Sequence
  source: /note="Description of Artificial Sequence: Synthetic probe"
gagaagttgtagctctgatgtctag

SEQ ID NO: 131 - DNA, 25 bp, Artificial Sequence
  source: /note="Description of Artificial Sequence: Synthetic probe"
gatgtctagctgtagtctccttgat

SEQ ID NO: 132 - DNA, 25 bp, Artificial Sequence
  source: /note="Description of Artificial Sequence: Synthetic probe"
gtctccttgatctgctgattgcatt

SEQ ID NO: 133 - DNA, 25 bp, Artificial Sequence
  source: /note="Description of Artificial Sequence: Synthetic probe"
gagcagtcactctcagaatcttgat

SEQ ID NO: 134 - DNA, 25 bp, Artificial Sequence
  source: /note="Description of Artificial Sequence: Synthetic probe"
tcagaatcttgattccccatcagcc

SEQ ID NO: 135 - DNA, 25 bp, Artificial Sequence
  source: /note="Description of Artificial Sequence: Synthetic probe"
aagtgggaccttgctgggcattata

SEQ ID NO: 136 - DNA, 25 bp, Artificial Sequence
  source: /note="Description of Artificial Sequence: Synthetic probe"
atgccctgtgggggtttcagagacc

SEQ ID NO: 137 - DNA, 25 bp, Artificial Sequence
  source: /note="Description of Artificial Sequence: Synthetic probe"
tctgcacaactgcatgcacttctct

SEQ ID NO: 138 - DNA, 25 bp, Artificial Sequence
  source: /note="Description of Artificial Sequence: Synthetic probe"
tcgctccacaacctgaaaccgagaa

SEQ ID NO: 139 - DNA, 25 bp, Artificial Sequence
  source: /note="Description of Artificial Sequence: Synthetic probe"
agaaggagttgctgaccagtgccca

SEQ ID NO: 140 - DNA, 25 bp, Artificial Sequence
  source: /note="Description of Artificial Sequence: Synthetic probe"
agcccgggaggaacacaggcagctc

SEQ ID NO: 141 - DNA, 25 bp, Artificial Sequence
  source: /note="Description of Artificial Sequence: Synthetic probe"
ctccaccagggtaccctgtcttggt

SEQ ID NO: 142 - DNA, 25 bp, Artificial Sequence
  source: /note="Description of Artificial Sequence: Synthetic probe"
tagtggaggtggatgtccttctctg

SEQ ID NO: 143 - DNA, 25 bp, Artificial Sequence
  source: /note="Description of Artificial Sequence: Synthetic probe"
aatgcccaattcttactgttcaggt

SEQ ID NO: 144 - DNA, 25 bp, Artificial Sequence
  source: /note="Description of Artificial Sequence: Synthetic probe"
tggaggcctgcgtgttggatgaact

SEQ ID NO: 145 - DNA, 25 bp, Artificial Sequence
  source: /note="Description of Artificial Sequence: Synthetic probe"
ttgacatggagctagccttcctgac

SEQ ID NO: 146 - DNA, 25 bp, Artificial Sequence
  source: /note="Description of Artificial Sequence: Synthetic probe"
cagggctgtcgccagaactatcatg

SEQ ID NO: 147 - DNA, 25 bp, Artificial Sequence
  source: /note="Description of Artificial Sequence: Synthetic probe"
tggagtgtgcaatgggggaccgcgg

SEQ ID NO: 148 - DNA, 25 bp, Artificial Sequence
  source: /note="Description of Artificial Sequence: Synthetic probe"
tccagccaccgcacgagtatgtgcc

SEQ ID NO: 149 - DNA, 25 bp, Artificial Sequence
  source: /note="Description of Artificial Sequence: Synthetic probe"
tgccctgggtcaccgtcaatgggaa

SEQ ID NO: 150 - DNA, 25 bp, Artificial Sequence
  source: /note="Description of Artificial Sequence: Synthetic probe"
ccttgtctgccagttgtaccagggc

SEQ ID NO: 151 - DNA, 25 bp, Artificial Sequence
  source: /note="Description of Artificial Sequence: Synthetic probe"
ggcaagaagccggatgtctgccctt

SEQ ID NO: 152 - DNA, 25 bp, Artificial Sequence
  source: /note="Description of Artificial Sequence: Synthetic probe"
ggagtgtttgcttcgagtgttggcc

SEQ ID NO: 153 - DNA, 25 bp, Artificial Sequence
  source: /note="Description of Artificial Sequence: Synthetic probe"
atgcatcccatgaagcccagataca

SEQ ID NO: 154 - DNA, 25 bp, Artificial Sequence
  source: /note="Description of Artificial Sequence: Synthetic probe"
ctagatcaagaatcctgctccacta

SEQ ID NO: 155 - DNA, 25 bp, Artificial Sequence
  source: /note="Description of Artificial Sequence: Synthetic probe"
ttagcgttcatccgtgtaacccgct

SEQ ID NO: 156 - DNA, 25 bp, Artificial Sequence
  source: /note="Description of Artificial Sequence: Synthetic probe"
gtaacccgctcatcactggatgaag

SEQ ID NO: 157 - DNA, 25 bp, Artificial Sequence
  source: /note="Description of Artificial Sequence: Synthetic probe"
gatgaagattctcctgtgctagatg

SEQ ID NO: 158 - DNA, 25 bp, Artificial Sequence
  source: /note="Description of Artificial Sequence: Synthetic probe"
gattctcctgtgctagatgtgcaaa

SEQ ID NO: 159 - DNA, 25 bp, Artificial Sequence
  source: /note="Description of Artificial Sequence: Synthetic probe"
gtgcaaatgcaagctagtggcttca

SEQ ID NO: 160 - DNA, 25 bp, Artificial Sequence
  source: /note="Description of Artificial Sequence: Synthetic probe"
gagaatcccactttctatagcagat

SEQ ID NO: 161 - DNA, 25 bp, Artificial Sequence
  source: /note="Description of Artificial Sequence: Synthetic probe"
caattttaatgctatttccccaggg

SEQ ID NO: 162 - DNA, 25 bp, Artificial Sequence
  source: /note="Description of Artificial Sequence: Synthetic probe"
gtatgtttacatatcacctcatggc

SEQ ID NO: 163 - DNA, 25 bp, Artificial Sequence
  source: /note="Description of Artificial Sequence: Synthetic probe"
tatcacctcatggcctattatatta

SEQ ID NO: 164 - DNA, 25 bp, Artificial Sequence
  source: /note="Description of Artificial Sequence: Synthetic probe"
gataacttgagcaccgtcatggctt

SEQ ID NO: 165 - DNA, 25 bp, Artificial Sequence
  source: /note="Description of Artificial Sequence: Synthetic probe"
gcaccgtcatggcttaatgtttatt

SEQ ID NO: 166 - DNA, 25 bp, Artificial Sequence
  source: /note="Description of Artificial Sequence: Synthetic probe"
aaaacccagataacaaccagagcaa

SEQ ID NO: 167 - DNA, 25 bp, Artificial Sequence
  source: /note="Description of Artificial Sequence: Synthetic probe"
gcaaaactgttgtgccttctattta

SEQ ID NO: 168 - DNA, 25 bp, Artificial Sequence
  source: /note="Description of Artificial Sequence: Synthetic probe"
ttatctttgatttcagtcttggcaa

SEQ ID NO: 169 - DNA, 25 bp, Artificial Sequence
  source: /note="Description of Artificial Sequence: Synthetic probe"
catatttgttatgccttattctaaa

SEQ ID NO: 170 - DNA, 25 bp, Artificial Sequence
  source: /note="Description of Artificial Sequence: Synthetic probe"
ttgagtctcaaactggaatgccttt

SEQ ID NO: 171 - DNA, 25 bp, Artificial Sequence
  source: /note="Description of Artificial Sequence: Synthetic probe"
gacagatgcttctatagaggttctt

SEQ ID NO: 172 - DNA, 25 bp, Artificial Sequence
  source: /note="Description of Artificial Sequence: Synthetic probe"
ggttctttgacctaaatagttcagc

SEQ ID NO: 173 - DNA, 25 bp, Artificial Sequence
  source: /note="Description of Artificial Sequence: Synthetic probe"
cagattcctaatcatagcccgtaag

SEQ ID NO: 174 - DNA, 25 bp, Artificial Sequence
  source: /note="Description of Artificial Sequence: Synthetic probe"
tgctcgtgtccgcattttttttttt

SEQ ID NO: 175 - DNA, 25 bp, Artificial Sequence
  source: /note="Description of Artificial Sequence: Synthetic probe"
ggttctcttttattgatgggcatgc

SEQ ID NO: 176 - DNA, 25 bp, Artificial Sequence
  source: /note="Description of Artificial Sequence: Synthetic probe"
gggcatgcagtgggtgttacttgga

SEQ ID NO: 177 - DNA, 25 bp, Artificial Sequence
  source: /note="Description of Artificial Sequence: Synthetic probe"
gcagtgctgctggtatttgccaaca

SEQ ID NO: 178 - DNA, 25 bp, Artificial Sequence
  source: /note="Description of Artificial Sequence: Synthetic probe"
tgcccgtgagcgagctgactgacaa

SEQ ID NO: 179 - DNA, 25 bp, Artificial Sequence
  source: /note="Description of Artificial Sequence: Synthetic probe"
tgccacccaaggcacaggtctgtac

SEQ ID NO: 180 - DNA, 25 bp, Artificial Sequence
  source: /note="Description of Artificial Sequence: Synthetic probe"
gtacgatggtctggactggctgtcc

SEQ ID NO: 181 - DNA, 25 bp, Artificial Sequence
  source: /note="Description of Artificial Sequence: Synthetic probe"
tcccacgagctgtcaaagcgctaac

SEQ ID NO: 182 - DNA, 25 bp, Artificial Sequence
  source: /note="Description of Artificial Sequence: Synthetic probe"
ctgcgtgcatccccgggatgaccag

SEQ ID NO: 183 - DNA, 25 bp, Artificial Sequence
  source: /note="Description of Artificial Sequence: Synthetic probe"
tctctgttgttggagcctggagcct

SEQ ID NO: 184 - DNA, 25 bp, Artificial Sequence
  source: /note="Description of Artificial Sequence: Synthetic probe"
gccttgctctctgggcacagagggg

SEQ ID NO: 185 - DNA, 25 bp, Artificial Sequence
  source: /note="Description of Artificial Sequence: Synthetic probe"
gcctgctgggacctatggaaggggc

SEQ ID NO: 186 - DNA, 25 bp, Artificial Sequence
  source: /note="Description of Artificial Sequence: Synthetic probe"
gccccctcttccagaggaggagcag

SEQ ID NO: 187 - DNA, 25 bp, Artificial Sequence
  source: /note="Description of Artificial Sequence: Synthetic probe"
gtgtactctaggggccaggttggga

SEQ ID NO: 188 - DNA, 25 bp, Artificial Sequence
  source: /note="Description of Artificial Sequence: Synthetic probe"
gatttagctcttagttcttcaagta

SEQ ID NO: 189 - DNA, 25 bp, Artificial Sequence
  source: /note="Description of Artificial Sequence: Synthetic probe"
gaacaggaactcagggtgcccttac

SEQ ID NO: 190 - DNA, 25 bp, Artificial Sequence
  source: /note="Description of Artificial Sequence: Synthetic probe"
tgactgacagagcaccatccaggca

SEQ ID NO: 191 - DNA, 25 bp, Artificial Sequence
  source: /note="Description of Artificial Sequence: Synthetic probe"
aaagcagtatacctttccacaggct

SEQ ID NO: 192 - DNA, 25 bp, Artificial Sequence
  source: /note="Description of Artificial Sequence: Synthetic probe"
tccctgccactctgagttatccaga

SEQ ID NO: 193 - DNA, 25 bp, Artificial Sequence
  source: /note="Description of Artificial Sequence: Synthetic probe"
gaaaccaccacctacaaatgagggg

SEQ ID NO: 194 - DNA, 25 bp, Artificial Sequence
  source: /note="Description of Artificial Sequence: Synthetic probe"
aggggactcatctagaagacctcta

SEQ ID NO: 195 - DNA, 25 bp, Artificial Sequence
  source: /note="Description of Artificial Sequence: Synthetic probe"
ccttttggctctgaggggtctctaa

SEQ ID NO: 196 - DNA, 25 bp, Artificial Sequence
  source: /note="Description of Artificial Sequence: Synthetic probe"
gggtctctaataatccccacttgga

SEQ ID NO: 197 - DNA, 25 bp, Artificial Sequence
  source: /note="Description of Artificial Sequence: Synthetic probe"
cccacttggaattcagcaccgcaag

SEQ ID NO: 198 - DNA, 25 bp, Artificial Sequence
  source: /note="Description of Artificial Sequence: Synthetic probe"
gaatgttggtgccttttgtgccaca

SEQ ID NO: 199 - DNA, 25 bp, Artificial Sequence
  source: /note="Description of Artificial Sequence: Synthetic probe"
gaaaaacagcctgtcggaccacagc

SEQ ID NO: 200 - DNA, 25 bp, Artificial Sequence
  source: /note="Description of Artificial Sequence: Synthetic probe"
gacccgatgagcctgctatacaaca

SEQ ID NO: 201 - DNA, 25 bp, Artificial Sequence
  source: /note="Description of Artificial Sequence: Synthetic probe"
cccgatgagcctgctatacaacatg

SEQ ID NO: 202 - DNA, 25 bp, Artificial Sequence
  source: /note="Description of Artificial Sequence: Synthetic probe"
gagcctgctatacaacatgaacgac

SEQ ID NO: 203 - DNA, 25 bp, Artificial Sequence
  source: /note="Description of Artificial Sequence: Synthetic probe"
tatacaacatgaacgactgctactc

SEQ ID NO: 204 - DNA, 25 bp, Artificial Sequence
  source: /note="Description of Artificial Sequence: Synthetic probe"
gtgtggctgaataagcggtgttcat

SEQ ID NO: 205 - DNA, 25 bp, Artificial Sequence
  source: /note="Description of Artificial Sequence: Synthetic probe"
gaataagcggtgttcatgatttctt

SEQ ID NO: 206 - DNA, 25 bp, Artificial Sequence
  source: /note="Description of Artificial Sequence: Synthetic probe"
agcggtgttcatgatttcttttatt

SEQ ID NO: 207 - DNA, 25 bp, Artificial Sequence
  source: /note="Description of Artificial Sequence: Synthetic probe"
ggtgttcatgatttcttttattctt

SEQ ID NO: 208 - DNA, 25 bp, Artificial Sequence
  source: /note="Description of Artificial Sequence: Synthetic probe"
caacaacaaattcacggaatctttt

SEQ ID NO: 209 - DNA, 25 bp, Artificial Sequence
  source: /note="Description of Artificial Sequence: Synthetic probe"
tcacggaatcttttaagtgctgaac

SEQ ID NO: 210 - DNA, 25 bp, Artificial Sequence
  source: /note="Description of Artificial Sequence: Synthetic probe"
acccagagcagcaccgtgtggtgag

SEQ ID NO: 211 - DNA, 25 bp, Artificial Sequence
  source: /note="Description of Artificial Sequence: Synthetic probe"
acatcctggacaagcaccggcaggt

SEQ ID NO: 212 - DNA, 25 bp, Artificial Sequence
  source: /note="Description of Artificial Sequence: Synthetic probe"
cggcaggtgggcaatgccgtgccac

SEQ ID NO: 213 - DNA, 25 bp, Artificial Sequence
  source: /note="Description of Artificial Sequence: Synthetic probe"
cccctggccaaagccattggcttgg

SEQ ID NO: 214 - DNA, 25 bp, Artificial Sequence
  source: /note="Description of Artificial Sequence: Synthetic probe"
gagatcaagctttgtatgttggcca

SEQ ID NO: 215 - DNA, 25 bp, Artificial Sequence
  source: /note="Description of Artificial Sequence: Synthetic probe"
agctgctaaggactagttctgccct

SEQ ID NO: 216 - DNA, 25 bp, Artificial Sequence
  source: /note="Description of Artificial Sequence: Synthetic probe"
caatctgtccgttcacatgtgtggt

SEQ ID NO: 217 - DNA, 25 bp, Artificial Sequence
  source: /note="Description of Artificial Sequence: Synthetic probe"
ggctgacatgaagctgttgtgtgag

SEQ ID NO: 218 - DNA, 25 bp, Artificial Sequence
  source: /note="Description of Artificial Sequence: Synthetic probe"
gtgtgaggttcgcttatcaactaat

SEQ ID NO: 219 - DNA, 25 bp, Artificial Sequence
  source: /note="Description of Artificial Sequence: Synthetic probe"
gcagtactttgtgcattctggattt

SEQ ID NO: 220 - DNA, 25 bp, Artificial Sequence
  source: /note="Description of Artificial Sequence: Synthetic probe"
atatcaaatctaccactgtatgagt

SEQ ID NO: 221 - DNA, 25 bp, Artificial Sequence
  source: /note="Description of Artificial Sequence: Synthetic probe"
ttgcatttggattggggtccctcta

SEQ ID NO: 222 - DNA, 25 bp, Artificial Sequence
  source: /note="Description of Artificial Sequence: Synthetic probe"
gggaatagtctagatggctcctctc

SEQ ID NO: 223 - DNA, 25 bp, Artificial Sequence
  source: /note="Description of Artificial Sequence: Synthetic probe"
ggctcctctcagtactttggaggcc

SEQ ID NO: 224 - DNA, 25 bp, Artificial Sequence
  source: /note="Description of Artificial Sequence: Synthetic probe"
ctatgtagtccgtgctgacagctgc

SEQ ID NO: 225 - DNA, 25 bp, Artificial Sequence
  source: /note="Description of Artificial Sequence: Synthetic probe"
gctcagcttctcctgtgtgattgac

SEQ ID NO: 226 - DNA, 25 bp, Artificial Sequence
  source: /note="Description of Artificial Sequence: Synthetic probe"
gctttgctgctgaaggctcatttta

SEQ ID NO: 227 - DNA, 25 bp, Artificial Sequence
  source: /note="Description of Artificial Sequence: Synthetic probe"
taaccctggtggttgctgttttcct

SEQ ID NO: 228 - DNA, 25 bp, Artificial Sequence
  source: /note="Description of Artificial Sequence: Synthetic probe"
tggccaaggagctgctatagcctgg

SEQ ID NO: 229 - DNA, 25 bp, Artificial Sequence
  source: /note="Description of Artificial Sequence: Synthetic probe"
ggctgagcccctgtctagagaggga

SEQ ID NO: 230 - DNA, 25 bp, Artificial Sequence
  source: /note="Description of Artificial Sequence: Synthetic probe"
gacacaggtctttcctaaggctgca

SEQ ID NO: 231 - DNA, 25 bp, Artificial Sequence
  source: /note="Description of Artificial Sequence: Synthetic probe"
gctgcaaggtttaggctggtggccc

SEQ ID NO: 232 - DNA, 25 bp, Artificial Sequence
  source: /note="Description of Artificial Sequence: Synthetic probe"
gtgcctaaaggactgccagccaagc

SEQ ID NO: 233 - DNA, 25 bp, Artificial Sequence
  source: /note="Description of Artificial Sequence: Synthetic probe"
gccaagctcagagtgctcgatctca

SEQ ID NO: 234 - DNA, 25 bp, Artificial Sequence
  source: /note="Description of Artificial Sequence: Synthetic probe"
gcaacagactgaacagggcgccgca

SEQ ID NO: 235 - DNA, 25 bp, Artificial Sequence
  source: /note="Description of Artificial Sequence: Synthetic probe"
tgacgagctgcccgaggtggataac

SEQ ID NO: 236 - DNA, 25 bp, Artificial Sequence
  source: /note="Description of Artificial Sequence: Synthetic probe"
ctgacactggacgggaatcccttcc

SEQ ID NO: 237 - DNA, 25 bp, Artificial Sequence
  source: /note="Description of Artificial Sequence: Synthetic probe"
acgagggctcaatgaactccggcgt

SEQ ID NO: 238 - DNA, 25 bp, Artificial Sequence
  source: /note="Description of Artificial Sequence: Synthetic probe"
cccggggctttgcctaagatccaag

SEQ ID NO: 239 - DNA, 25 bp, Artificial Sequence
  source: /note="Description of Artificial Sequence: Synthetic probe"
gggagtcccgtcaggacgttgagga

SEQ ID NO: 240 - DNA, 25 bp, Artificial Sequence
  source: /note="Description of Artificial Sequence: Synthetic probe"
tgaggacttttcgaccaattcaacc

SEQ ID NO: 241 - DNA, 25 bp, Artificial Sequence
  source: /note="Description of Artificial Sequence: Synthetic probe"
ccatccagaatctagcgctgcgcaa

SEQ ID NO: 242 - DNA, 25 bp, Artificial Sequence
  source: /note="Description of Artificial Sequence: Synthetic probe"
ccctagcgctccgagatgcatgtgg

SEQ ID NO: 243 - DNA, 25 bp, Artificial Sequence
  source: /note="Description of Artificial Sequence: Synthetic probe"
ggtttcatctatcaaatgtctcctc

SEQ ID NO: 244 - DNA, 25 bp, Artificial Sequence
  source: /note="Description of Artificial Sequence: Synthetic probe"
tcctctgacttccttttgaaactta

SEQ ID NO: 245 - DNA, 25 bp, Artificial Sequence
  source: /note="Description of Artificial Sequence: Synthetic probe"
acttactgctcttctgttttatttt

SEQ ID NO: 246 - DNA, 25 bp, Artificial Sequence
  source: /note="Description of Artificial Sequence: Synthetic probe"
gacagggatgcaatccagggtggga

SEQ ID NO: 247 - DNA, 25 bp, Artificial Sequence
  source: /note="Description of Artificial Sequence: Synthetic probe"
tagccagaaacctgctggcctctgc

SEQ ID NO: 248 - DNA, 25 bp, Artificial Sequence
  source: /note="Description of Artificial Sequence: Synthetic probe"
tgttttcatttcccactttggttgt

SEQ ID NO: 249 - DNA, 25 bp, Artificial Sequence
  source: /note="Description of Artificial Sequence: Synthetic probe"
actttcctgcttgtcatgacttttt

SEQ ID NO: 250 - DNA, 25 bp, Artificial Sequence
  source: /note="Description of Artificial Sequence: Synthetic probe"
gactttttgacacacttgccatgac

SEQ ID NO: 251 - DNA, 25 bp, Artificial Sequence
  source: /note="Description of Artificial Sequence: Synthetic probe"
gatattttacagctggacctagttt

SEQ ID NO: 252 - DNA, 25 bp, Artificial Sequence
  source: /note="Description of Artificial Sequence: Synthetic probe"
gctggacctagtttcacaatctgtt

SEQ ID NO: 253 - DNA, 25 bp, Artificial Sequence
  source: /note="Description of Artificial Sequence: Synthetic probe"
ctccagctctgcatatgtctggcca

SEQ ID NO: 254 - DNA, 25 bp, Artificial Sequence
  source: /note="Description of Artificial Sequence: Synthetic probe"
gcttggtctgtttgactttacgccc

SEQ ID NO: 255 - DNA, 25 bp, Artificial Sequence
  source: /note="Description of Artificial Sequence: Synthetic probe"
ccatctcaggacacttccgtagact

SEQ ID NO: 256 - DNA, 25 bp, Artificial Sequence
  source: /note="Description of Artificial Sequence: Synthetic probe"
gtttaggttcccctgtcaaatatca

SEQ ID NO: 257 - DNA, 25 bp, Artificial Sequence
  source: /note="Description of Artificial Sequence: Synthetic probe"
caaatatcagttacccactcggtcc

SEQ ID NO: 258 - DNA, 25 bp, Artificial Sequence
  source: /note="Description of Artificial Sequence: Synthetic probe"
tgaatcatgagcctgctggaagccc

SEQ ID NO: 259 - DNA, 25 bp, Artificial Sequence
  source: /note="Description of Artificial Sequence: Synthetic probe"
cccctactgctgtgaaccctggggc

SEQ ID NO: 260 - DNA, 25 bp, Artificial Sequence
  source: /note="Description of Artificial Sequence: Synthetic probe"
ttgctgctgtcttgttgcggatgga

SEQ ID NO: 261 - DNA, 25 bp, Artificial Sequence
  source: /note="Description of Artificial Sequence: Synthetic probe"
gatggccgtggatggccgtggatgc

SEQ ID NO: 262 - DNA, 25 bp, Artificial Sequence
  source: /note="Description of Artificial Sequence: Synthetic probe"
gtgggagcgttttgttgagcatgac

SEQ ID NO: 263 - DNA, 25 bp, Artificial Sequence
  source: /note="Description of Artificial Sequence: Synthetic probe"
gcaccctctggattctgaatctcaa

SEQ ID NO: 264 - DNA, 25 bp, Artificial Sequence
  source: /note="Description of Artificial Sequence: Synthetic probe"
gagtcatctgttagggccttggttc

SEQ ID NO: 265 - DNA, 25 bp, Artificial Sequence
  source: /note="Description of Artificial Sequence: Synthetic probe"
ggctgcttaactgctgtataggaca

SEQ ID NO: 266 - DNA, 25 bp, Artificial Sequence
  source: /note="Description of Artificial Sequence: Synthetic probe"
tgctgtataggacaagccccttacc

SEQ ID NO: 267 - DNA, 25 bp, Artificial Sequence
  source: /note="Description of Artificial Sequence: Synthetic probe"
gcccatgaattcctggcttggttta

SEQ ID NO: 268 - DNA, 25 bp, Artificial Sequence
  source: /note="Description of Artificial Sequence: Synthetic probe"
ggcttggtttatgttctgatttgac

SEQ ID NO: 269 - DNA, 25 bp, Artificial Sequence
  source: /note="Description of Artificial Sequence: Synthetic probe"
ggtggcattccgacagcaggacata

SEQ ID NO: 270 - DNA, 25 bp, Artificial Sequence
  source: /note="Description of Artificial Sequence: Synthetic probe"
gaagactgggacgacactgggtaga

SEQ ID NO: 271 - DNA, 25 bp, Artificial Sequence
  source: /note="Description of Artificial Sequence: Synthetic probe"
agttctgtgctgtctatgtggacac

SEQ ID NO: 272 - DNA, 25 bp, Artificial Sequence
  source: /note="Description of Artificial Sequence: Synthetic probe"
aatgctgcctgtgtctatggggttc

SEQ ID NO: 273 - DNA, 25 bp, Artificial Sequence
  source: /note="Description of Artificial Sequence: Synthetic probe"
tatggggttctgtcttctttgatag

SEQ ID NO: 274 - DNA, 25 bp, Artificial Sequence
  source: /note="Description of Artificial Sequence: Synthetic probe"
gatagccatctattcatctggatca

SEQ ID NO: 275 - DNA, 25 bp, Artificial Sequence
  source: /note="Description of Artificial Sequence: Synthetic probe"
atctggatcatgggaccctctctaa

SEQ ID NO: 276 - DNA, 25 bp, Artificial Sequence
  source: /note="Description of Artificial Sequence: Synthetic probe"
gggccacagtttcagtacttcagcc

SEQ ID NO: 277 - DNA, 25 bp, Artificial Sequence
  source: /note="Description of Artificial Sequence: Synthetic probe"
cttcagcctcagtggggttcctgat

SEQ ID NO: 278 - DNA, 25 bp, Artificial Sequence
  source: /note="Description of Artificial Sequence: Synthetic probe"
tttggagtctcctgtgatcacatct

SEQ ID NO: 279 - DNA, 25 bp, Artificial Sequence
  source: /note="Description of Artificial Sequence: Synthetic probe"
tcacatcttgtctcggctgtaggaa

SEQ ID NO: 280 - DNA, 25 bp, Artificial Sequence
  source: /note="Description of Artificial Sequence: Synthetic probe"
gacgtcctctacataaaagctccat

SEQ ID NO: 281 - DNA, 25 bp, Artificial Sequence
  source: /note="Description of Artificial Sequence: Synthetic probe"
gctactcctagtcttaacatttgca

SEQ ID NO: 282 - DNA, 25 bp, Artificial Sequence
  source: /note="Description of Artificial Sequence: Synthetic probe"
tgtcttctggtcctgatgtagtccc

SEQ ID NO: 283 - DNA, 25 bp, Artificial Sequence
  source: /note="Description of Artificial Sequence: Synthetic probe"
ccctcctggacctatttatcctgaa

SEQ ID NO: 284 - DNA, 25 bp, Artificial Sequence
  source: /note="Description of Artificial Sequence: Synthetic probe"
attcattaaccatagtactcctccc

SEQ ID NO: 285 - DNA, 25 bp, Artificial Sequence
  source: /note="Description of Artificial Sequence: Synthetic probe"
gacacctctctcaggagcttctgag

SEQ ID NO: 286 - DNA, 25 bp, Artificial Sequence
  source: /note="Description of Artificial Sequence: Synthetic probe"
ctctggagcgagccctatgtcaggc

SEQ ID NO: 287 - DNA, 25 bp, Artificial Sequence
  source: /note="Description of Artificial Sequence: Synthetic probe"
ggctcctacctggtctggaaagagc

SEQ ID NO: 288 - DNA, 25 bp, Artificial Sequence
  source: /note="Description of Artificial Sequence: Synthetic probe"
ggaaagagctgggaggcttcacaga

SEQ ID NO: 289 - DNA, 25 bp, Artificial Sequence
  source: /note="Description of Artificial Sequence: Synthetic probe"
catcttctttggtgcccgacaaatg

SEQ ID NO: 290 - DNA, 25 bp, Artificial Sequence
  source: /note="Description of Artificial Sequence: Synthetic probe"
ccgacaaatgggctgggccttggtg

SEQ ID NO: 291 - DNA, 25 bp, Artificial Sequence
  source: /note="Description of Artificial Sequence: Synthetic probe"
cgtggcctggtaccaggtgagcccg

SEQ ID NO: 292 - DNA, 25 bp, Artificial Sequence
  source: /note="Description of Artificial Sequence: Synthetic probe"
gaccacactcaactactgcgtatgg

SEQ ID NO: 293 - DNA, 25 bp, Artificial Sequence
  source: /note="Description of Artificial Sequence: Synthetic probe"
aactactgcgtatggcgggacaacc

SEQ ID NO: 294 - DNA, 25 bp, Artificial Sequence
  source: /note="Description of Artificial Sequence: Synthetic probe"
atggcgggacaaccatggctggcat

SEQ ID NO: 295 - DNA, 25 bp, Artificial Sequence
  source: /note="Description of Artificial Sequence: Synthetic probe"
tgcaccagcaggtgccatcacgctt

SEQ ID NO: 296 - DNA, 25 bp, Artificial Sequence
  source: /note="Description of Artificial Sequence: Synthetic probe"
tcacgcttgtgatgtggtggccgtc

SEQ ID NO: 297 - DNA, 25 bp, Artificial Sequence
  source: /note="Description of Artificial Sequence: Synthetic probe"
gtgctttctgcatgcttagagcatg

SEQ ID NO: 298 - DNA, 25 bp, Artificial Sequence
  source: /note="Description of Artificial Sequence: Synthetic probe"
aggtttgtcagggtcactctaaaga

SEQ ID NO: 299 - DNA, 25 bp, Artificial Sequence
  source: /note="Description of Artificial Sequence: Synthetic probe"
gtgaaatatcatccatctaatcttg

SEQ ID NO: 300 - DNA, 25 bp, Artificial Sequence
  source: /note="Description of Artificial Sequence: Synthetic probe"
tgtaaaaagtacccagtagccccat

SEQ ID NO: 301 - DNA, 25 bp, Artificial Sequence
  source: /note="Description of Artificial Sequence: Synthetic probe"
gtagccccatttcatacaatgtacc

SEQ ID NO: 302 - DNA, 25 bp, Artificial Sequence
  source: /note="Description of Artificial Sequence: Synthetic probe"
gcagtaacttggcatcatcgttccc

SEQ ID NO: 303 - DNA, 25 bp, Artificial Sequence
  source: /note="Description of Artificial Sequence: Synthetic probe"
agtgtgtggcgctgatggagatgtc

SEQ ID NO: 304 - DNA, 25 bp, Artificial Sequence
  source: /note="Description of Artificial Sequence: Synthetic probe"
gtcagaaccgagaacacttaacctt

SEQ ID NO: 305 - DNA, 25 bp, Artificial Sequence
  source: /note="Description of Artificial Sequence: Synthetic probe"
gatccacccctatgagagcaagtaa

SEQ ID NO: 306 - DNA, 25 bp, Artificial Sequence
  source: /note="Description of Artificial Sequence: Synthetic probe"
gagattcgtgttactttggcttttc

SEQ ID NO: 307 - DNA, 25 bp, Artificial Sequence
  source: /note="Description of Artificial Sequence: Synthetic probe"
gcttttctgtctctgttgacacggt

SEQ ID NO: 308 - DNA, 25 bp, Artificial Sequence
  source: /note="Description of Artificial Sequence: Synthetic probe"
gacacggttgcacatttccaagtta

SEQ ID NO: 309 - DNA, 25 bp, Artificial Sequence
  source: /note="Description of Artificial Sequence: Synthetic probe"
gcatgtccctgaagaggtgctagct

SEQ ID NO: 310 - DNA, 25 bp, Artificial Sequence
  source: /note="Description of Artificial Sequence: Synthetic probe"
gaacccattatcctgccagcatggg

SEQ ID NO: 311 - DNA, 25 bp, Artificial Sequence
  source: /note="Description of Artificial Sequence: Synthetic probe"
accccatgggagctttggctgagtg

SEQ ID NO: 312 - DNA, 25 bp, Artificial Sequence
  source: /note="Description of Artificial Sequence: Synthetic probe"
tttggctgagtgatactgccctcca

SEQ ID NO: 313 - DNA, 25 bp, Artificial Sequence
  source: /note="Description of Artificial Sequence: Synthetic probe"
tcctccttccatggaacctgacgta

SEQ ID NO: 314 - DNA, 25 bp, Artificial Sequence
  source: /note="Description of Artificial Sequence: Synthetic probe"
aggaacctcttcagaaagtgtgctt

SEQ ID NO: 315 - DNA, 25 bp, Artificial Sequence
  source: /note="Description of Artificial Sequence: Synthetic probe"
tctcctcatctctaacagctcagga

SEQ ID NO: 316 - DNA, 25 bp, Artificial Sequence
  source: /note="Description of Artificial Sequence: Synthetic probe"
aacagctcaggatctcttagcattt

SEQ ID NO: 317 - DNA, 25 bp, Artificial Sequence
  source: /note="Description of Artificial Sequence: Synthetic probe"
aaacagacctaatgctccttgttcc

SEQ ID NO: 318 - DNA, 25 bp, Artificial Sequence
  source: /note="Description of Artificial Sequence: Synthetic probe"
gagggtggcctaagagttgagctct

SEQ ID NO: 319 - DNA, 25 bp, Artificial Sequence
  source: /note="Description of Artificial Sequence: Synthetic probe"
ttgagctctcggaactgcatgctgc

SEQ ID NO: 320 - DNA, 25 bp, Artificial Sequence
  source: /note="Description of Artificial Sequence: Synthetic probe"
agccgcagcgcagactggcggagaa

SEQ ID NO: 321 - DNA, 25 bp, Artificial Sequence
  source: /note="Description of Artificial Sequence: Synthetic probe"
tgtggggagatccactgggaccccc

SEQ ID NO: 322 - DNA, 25 bp, Artificial Sequence
  source: /note="Description of Artificial Sequence: Synthetic probe"
aaggaggagttccaccatgagctca

SEQ ID NO: 323 - DNA, 25 bp, Artificial Sequence
  source: /note="Description of Artificial Sequence: Synthetic probe"
ctcacccgtgtctatgacgcaaaga

SEQ ID NO: 324 - DNA, 25 bp, Artificial Sequence
  source: /note="Description of Artificial Sequence: Synthetic probe"
aaagatcaccagccatgtgccttag

SEQ ID NO: 325 - DNA, 25 bp, Artificial Sequence
  source: /note="Description of Artificial Sequence: Synthetic probe"
gccttagtgtccttcttaacagact

SEQ ID NO: 326 - DNA, 25 bp, Artificial Sequence
  source: /note="Description of Artificial Sequence: Synthetic probe"
ggaccacgaatattctttctgtcca

SEQ ID NO: 327 - DNA, 25 bp, Artificial Sequence
  source: /note="Description of Artificial Sequence: Synthetic probe"
tgtccagaagggctactttccacat

SEQ ID NO: 328 - DNA, 25 bp, Artificial Sequence
  source: /note="Description of Artificial Sequence: Synthetic probe"
tatagagctccagggactgtctttt

SEQ ID NO: 329 - DNA, 25 bp, Artificial Sequence
  source: /note="Description of Artificial Sequence: Synthetic probe"
tagaacgggcatctactccagtact

SEQ ID NO: 330 - DNA, 25 bp, Artificial Sequence
  source: /note="Description of Artificial Sequence: Synthetic probe"
cagtacttcctgccataaaactcca

SEQ ID NO: 331 - DNA, 25 bp, Artificial Sequence
  source: /note="Description of Artificial Sequence: Synthetic probe"
cagccacaaaactgtcattcactct

SEQ ID NO: 332 - DNA, 25 bp, Artificial Sequence
  source: /note="Description of Artificial Sequence: Synthetic probe"
tcattcactctaggggacccctact

SEQ ID NO: 333 - DNA, 25 bp, Artificial Sequence
  source: /note="Description of Artificial Sequence: Synthetic probe"
acttcaggtgtgcagccctgagctc

SEQ ID NO: 334 - DNA, 25 bp, Artificial Sequence
  source: /note="Description of Artificial Sequence: Synthetic probe"
catgccacacacttgctgtaaggct

SEQ ID NO: 335 - DNA, 25 bp, Artificial Sequence
  source: /note="Description of Artificial Sequence: Synthetic probe"
gaatcatggttctgcagtctggtgt

SEQ ID NO: 336 - DNA, 25 bp, Artificial Sequence
  source: /note="Description of Artificial Sequence: Synthetic probe"
aatctatgactcccaatatcttcta

SEQ ID NO: 337 - DNA, 25 bp, Artificial Sequence
  source: /note="Description of Artificial Sequence: Synthetic probe"
aacacaagggccctccttgtcattg

SEQ ID NO: 338 - DNA, 25 bp, Artificial Sequence
  source: /note="Description of Artificial Sequence: Synthetic probe"
ccctccttgtcattgaccttagcta

SEQ ID NO: 339 - DNA, 25 bp, Artificial Sequence
  source: /note="Description of Artificial Sequence: Synthetic probe"
gaccttagctaaaccatggcaattc

SEQ ID NO: 340 - DNA, 25 bp, Artificial Sequence
  source: /note="Description of Artificial Sequence: Synthetic probe"
ttgacagatggtatcccttcctgga

SEQ ID NO: 341 - DNA, 25 bp, Artificial Sequence
  source: /note="Description of Artificial Sequence: Synthetic probe"
ctggatcattcatttcaccttggtt

SEQ ID NO: 342 - DNA, 25 bp, Artificial Sequence
  source: /note="Description of Artificial Sequence: Synthetic probe"
gttacggcattgccttttctttctg

SEQ ID NO: 343 - DNA, 25 bp, Artificial Sequence
  source: /note="Description of Artificial Sequence: Synthetic probe"
ttctgtggatccagtatcttcctcg

SEQ ID NO: 344 - DNA, 25 bp, Artificial Sequence
  source: /note="Description of Artificial Sequence: Synthetic probe"
atcttcctcggctttttagggagca

SEQ ID NO: 345 - DNA, 25 bp, Artificial Sequence
  source: /note="Description of Artificial Sequence: Synthetic probe"
aaacctgccctgttgtatataactg

SEQ ID NO: 346 - DNA, 25 bp, Artificial Sequence
  source: /note="Description of Artificial Sequence: Synthetic probe"
aactgtgtctgtttcaccgtgtgac

SEQ ID NO: 347 - DNA, 25 bp, Artificial Sequence
  source: /note="Description of Artificial Sequence: Synthetic probe"
gccacgatttgcccgagggttactc

SEQ ID NO: 348 - DNA, 25 bp, Artificial Sequence
  source: /note="Description of Artificial Sequence: Synthetic probe"
cctttgctctcaccttgtatggatg

SEQ ID NO: 349 - DNA, 25 bp, Artificial Sequence
  source: /note="Description of Artificial Sequence: Synthetic probe"
gatgaagccatttcttatcctgtag

SEQ ID NO: 350 - DNA, 25 bp, Artificial Sequence
  source: /note="Description of Artificial Sequence: Synthetic probe"
gtagcatcagaagctcgttccttca

SEQ ID NO: 351 - DNA, 25 bp, Artificial Sequence
  source: /note="Description of Artificial Sequence: Synthetic probe"
cacactcagtggcgtctgtgcttgt

SEQ ID NO: 352 - DNA, 25 bp, Artificial Sequence
  source: /note="Description of Artificial Sequence: Synthetic probe"
cacccagggcgcctgttgacaagtg

SEQ ID NO: 353 - DNA, 25 bp, Artificial Sequence
  source: /note="Description of Artificial Sequence: Synthetic probe"
ccaccaagccacaagagacgtcata

SEQ ID NO: 354 - DNA, 25 bp, Artificial Sequence
  source: /note="Description of Artificial Sequence: Synthetic probe"
aacacaggctccagcatatctcata

SEQ ID NO: 355 - DNA, 25 bp, Artificial Sequence
  source: /note="Description of Artificial Sequence: Synthetic probe"
gtttcgctggcataactctcagtgg

SEQ ID NO: 356 - DNA, 25 bp, Artificial Sequence
  source: /note="Description of Artificial Sequence: Synthetic probe"
ctcgaaagacctgaccttttctaca

SEQ ID NO: 357 - DNA, 25 bp, Artificial Sequence
  source: /note="Description of Artificial Sequence: Synthetic probe"
ggagccataagtcccgatttcttca

SEQ ID NO: 358 - DNA, 25 bp, Artificial Sequence
  source: /note="Description of Artificial Sequence: Synthetic probe"
gatttcttcaatgattaccaccttc

SEQ ID NO: 359 - DNA, 25 bp, Artificial Sequence
  source: /note="Description of Artificial Sequence: Synthetic probe"
ggatggctttggccaaccagttggc

SEQ ID NO: 360 - DNA, 25 bp, Artificial Sequence
  source: /note="Description of Artificial Sequence: Synthetic probe"
ccctgccacagcatatggattccgc

SEQ ID NO: 361 - DNA, 25 bp, Artificial Sequence
  source: /note="Description of Artificial Sequence: Synthetic probe"
gcatatggattccgccctgatgaac

SEQ ID NO: 362 - DNA, 25 bp, Artificial Sequence
  source: /note="Description of Artificial Sequence: Synthetic probe"
gaaccttactactatggctatggat

SEQ ID NO: 363 - DNA, 25 bp, Artificial Sequence
  source: /note="Description of Artificial Sequence: Synthetic probe"
gtatctgtttccatgtgtaatctca

SEQ ID NO: 364 - DNA, 25 bp, Artificial Sequence
  source: /note="Description of Artificial Sequence: Synthetic probe"
agcaggagcaagaccaggagtcggc

SEQ ID NO: 365 - DNA, 25 bp, Artificial Sequence
  source: /note="Description of Artificial Sequence: Synthetic probe"
caagaaggctccctagtggacacgc

SEQ ID NO: 366 - DNA, 25 bp, Artificial Sequence
  source: /note="Description of Artificial Sequence: Synthetic probe"
gtggacacgctgcaatctagtgaca

SEQ ID NO: 367 - DNA, 25 bp, Artificial Sequence
  source: /note="Description of Artificial Sequence: Synthetic probe"
aagtttaacaggcttttctcatgaa

SEQ ID NO: 368 - DNA, 25 bp, Artificial Sequence
  source: /note="Description of Artificial Sequence: Synthetic probe"
gaactagacgactcttggtaaccat

SEQ ID NO: 369 - DNA, 25 bp, Artificial Sequence
  source: /note="Description of Artificial Sequence: Synthetic probe"
cttggtaaccatgtttgctgcccag

SEQ ID NO: 370 - DNA, 25 bp, Artificial Sequence
  source: /note="Description of Artificial Sequence: Synthetic probe"
tgtttgctgcccagcttctaactta

SEQ ID NO: 371 - DNA, 25 bp, Artificial Sequence
  source: /note="Description of Artificial Sequence: Synthetic probe"
ccagcttctaacttacataccgtga

SEQ ID NO: 372 - DNA, 25 bp, Artificial Sequence
  source: /note="Description of Artificial Sequence: Synthetic probe"
aaatgtttccctatcatcagacaaa

SEQ ID NO: 373 - DNA, 25 bp, Artificial Sequence
  source: /note="Description of Artificial Sequence: Synthetic probe"
gataccatagtgtgtgaaccaagaa

SEQ ID NO: 374 - DNA, 25 bp, Artificial Sequence
  source: /note="Description of Artificial Sequence: Synthetic probe"
aaacctcttctccagtcatagtatt

SEQ ID NO: 375 - DNA, 25 bp, Artificial Sequence
  source: /note="Description of Artificial Sequence: Synthetic probe"
aagctaggtcgtgggtcagctctga

SEQ ID NO: 376 - DNA, 25 bp, Artificial Sequence
  source: /note="Description of Artificial Sequence: Synthetic probe"
agctctgaggatgtatacccctggt

SEQ ID NO: 377 - DNA, 25 bp, Artificial Sequence
  source: /note="Description of Artificial Sequence: Synthetic probe"
gagggagacctagagatctggctgt

SEQ ID NO: 378 - DNA, 25 bp, Artificial Sequence
  source: /note="Description of Artificial Sequence: Synthetic probe"
agccttgtttgtactgtatgccttc

SEQ ID NO: 379 - DNA, 25 bp, Artificial Sequence
  source: /note="Description of Artificial Sequence: Synthetic probe"
atgccttcagcattgcctaggaaca

SEQ ID NO: 380 - DNA, 25 bp, Artificial Sequence
  source: /note="Description of Artificial Sequence: Synthetic probe"
gaacacgaagcacgatcagtccatc

SEQ ID NO: 381 - DNA, 25 bp, Artificial Sequence
  source: /note="Description of Artificial Sequence: Synthetic probe"
tcaacacttgtatctggcctctgtg

SEQ ID NO: 382 - DNA, 25 bp, Artificial Sequence
  source: /note="Description of Artificial Sequence: Synthetic probe"
tgtgaatgtaccgtctctgctaaac

SEQ ID NO: 383 - DNA, 25 bp, Artificial Sequence
  source: /note="Description of Artificial Sequence: Synthetic probe"
tgtttggttttctcggatacttgcc

SEQ ID NO: 384 - DNA, 25 bp, Artificial Sequence
  source: /note="Description of Artificial Sequence: Synthetic probe"
gccaaaatgagactctccgtcggca

SEQ ID NO: 385 - DNA, 25 bp, Artificial Sequence
  source: /note="Description of Artificial Sequence: Synthetic probe"
ccctggctcctggtcgggaagggag

SEQ ID NO: 386 - DNA, 25 bp, Artificial Sequence
  source: /note="Description of Artificial Sequence: Synthetic probe"
taccatgaagctctgcgtgactgtc

SEQ ID NO: 387 - DNA, 25 bp, Artificial Sequence
  source: /note="Description of Artificial Sequence: Synthetic probe"
ctcatgctagtagctgccttctgct

SEQ ID NO: 388 - DNA, 25 bp, Artificial Sequence
  source: /note="Description of Artificial Sequence: Synthetic probe"
gctctcagcaccaatgggctcagac

SEQ ID NO: 389 - DNA, 25 bp, Artificial Sequence
  source: /note="Description of Artificial Sequence: Synthetic probe"
tttcttacaccgcgaggaagcttcc

SEQ ID NO: 390 - DNA, 25 bp, Artificial Sequence
  source: /note="Description of Artificial Sequence: Synthetic probe"
gcttcctcgcaactttgtggtagat

SEQ ID NO: 391 - DNA, 25 bp, Artificial Sequence
  source: /note="Description of Artificial Sequence: Synthetic probe"
agtctgtgctgatcccagtgaatcc

SEQ ID NO: 392 - DNA, 25 bp, Artificial Sequence
  source: /note="Description of Artificial Sequence: Synthetic probe"
gacctggaactgaactgagctgctc

SEQ ID NO: 393 - DNA, 25 bp, Artificial Sequence
  source: /note="Description of Artificial Sequence: Synthetic probe"
tcagggaaggtcacctgagcccgga

SEQ ID NO: 394 - DNA, 25 bp, Artificial Sequence
  source: /note="Description of Artificial Sequence: Synthetic probe"
tccatgagacacatctcctccatac

SEQ ID NO: 395 - DNA, 25 bp, Artificial Sequence
  source: /note="Description of Artificial Sequence: Synthetic probe"
atcttttttatgtgccgtgttattg

SEQ ID NO: 396 - DNA, 25 bp, Artificial Sequence
  source: /note="Description of Artificial Sequence: Synthetic probe"
ctatggggatggtccactgtcactg

SEQ ID NO: 397 - DNA, 25 bp, Artificial Sequence
  source: /note="Description of Artificial Sequence: Synthetic probe"
gtgacgcaggccctgacaacagttc

SEQ ID NO: 398 - DNA, 25 bp, Artificial Sequence
  source: /note="Description of Artificial Sequence: Synthetic probe"
gccccagggacagttgtggttagcc

SEQ ID NO: 399 - DNA, 25 bp, Artificial Sequence
  source: /note="Description of Artificial Sequence: Synthetic probe"
ggttagccgtatcattgtgtgggac

SEQ ID NO: 400 - DNA, 25 bp, Artificial Sequence
  source: /note="Description of Artificial Sequence: Synthetic probe"
tgtgtgggacatcatggccttcaat

SEQ ID NO: 401 - DNA, 25 bp, Artificial Sequence
  source: /note="Description of Artificial Sequence: Synthetic probe"
tcaatggcatcatccatgctctggc

SEQ ID NO: 402 - DNA, 25 bp, Artificial Sequence
  source: /note="Description of Artificial Sequence: Synthetic probe"
cgaggcaagcccacgggctttggct

SEQ ID NO: 403 - DNA, 25 bp, Artificial Sequence
  source: /note="Description of Artificial Sequence: Synthetic probe"
agatgatgctgacgacgacttctca

SEQ ID NO: 404 - DNA, 25 bp, Artificial Sequence
  source: /note="Description of Artificial Sequence: Synthetic probe"
tggcagcgacaccttttgtgaaccc

SEQ ID NO: 405 - DNA, 25 bp, Artificial Sequence
  source: /note="Description of Artificial Sequence: Synthetic probe"
cactgctggaggaggacttccctga

SEQ ID NO: 406 - DNA, 25 bp, Artificial Sequence
  source: /note="Description of Artificial Sequence: Synthetic probe"
cctgacacccagaggatcctcacag

SEQ ID NO: 407 - DNA, 25 bp, Artificial Sequence
  source: /note="Description of Artificial Sequence: Synthetic probe"
acttttattgcttgtctgggtggat

SEQ ID NO: 408 - DNA, 25 bp, Artificial Sequence
  source: /note="Description of Artificial Sequence: Synthetic probe"
atccattgtccttgtagtttcttcc

SEQ ID NO: 409 - DNA, 25 bp, Artificial Sequence
  source: /note="Description of Artificial Sequence: Synthetic probe"
ctgttctctggttatagctggtccc

SEQ ID NO: 410 - DNA, 25 bp, Artificial Sequence
  source: /note="Description of Artificial Sequence: Synthetic probe"
ggtcccaggtcagcgtgggaggcac

SEQ ID NO: 411 - DNA, 25 bp, Artificial Sequence
  source: /note="Description of Artificial Sequence: Synthetic probe"
cactttgtagtctcatcccagatta

SEQ ID NO: 412 - DNA, 25 bp, Artificial Sequence
  source: /note="Description of Artificial Sequence: Synthetic probe"
atcccagattactaacccttcctga

SEQ ID NO: 413 - DNA, 25 bp, Artificial Sequence
  source: /note="Description of Artificial Sequence: Synthetic probe"
cagccgtactgagtctgtaaggccc

SEQ ID NO: 414 - DNA, 25 bp, Artificial Sequence
  source: /note="Description of Artificial Sequence: Synthetic probe"
aagtgggtacagacagcctgggctg

SEQ ID NO: 415 - DNA, 25 bp, Artificial Sequence
  source: /note="Description of Artificial Sequence: Synthetic probe"
tgagcctgtcagtagtgggtaccaa

SEQ ID NO: 416 - DNA, 25 bp, Artificial Sequence
  source: /note="Description of Artificial Sequence: Synthetic probe"
acctgctgcactcatctgatgtaaa

SEQ ID NO: 417 - DNA, 25 bp, Artificial Sequence
  source: /note="Description of Artificial Sequence: Synthetic probe"
tgtaaaaccatcccagagctggcga

SEQ ID NO: 418 - DNA, 25 bp, Artificial Sequence
  source: /note="Description of Artificial Sequence: Synthetic probe"
aactgctttgcactatcgtttgctt

SEQ ID NO: 419 - DNA, 25 bp, Artificial Sequence
  source: /note="Description of Artificial Sequence: Synthetic probe"
tgaccttcatggccgtcggaggagg

SEQ ID NO: 420 - DNA, 25 bp, Artificial Sequence
  source: /note="Description of Artificial Sequence: Synthetic probe"
tggcagcagcgtcgtcataggtaat

SEQ ID NO: 421 - DNA, 25 bp, Artificial Sequence
  source: /note="Description of Artificial Sequence: Synthetic probe"
gtcgtcataggtaatattggtgccc

SEQ ID NO: 422 - DNA, 25 bp, Artificial Sequence
  source: /note="Description of Artificial Sequence: Synthetic probe"
attggtgccctgatgggctacgcca

SEQ ID NO: 423 - DNA, 25 bp, Artificial Sequence
  source: /note="Description of Artificial Sequence: Synthetic probe"
gccacccacaagtatctcgatagtg

SEQ ID NO: 424 - DNA, 25 bp, Artificial Sequence
  source: /note="Description of Artificial Sequence: Synthetic probe"
ggatgaggagtagccagcagctccc

SEQ ID NO: 425 - DNA, 25 bp, Artificial Sequence
  source: /note="Description of Artificial Sequence: Synthetic probe"
ttcttggcctaactcttccagttag

SEQ ID NO: 426 - DNA, 25 bp, Artificial Sequence
  source: /note="Description of Artificial Sequence: Synthetic probe"
aactcttccagttaggatctagaac

SEQ ID NO: 427 - DNA, 25 bp, Artificial Sequence
  source: /note="Description of Artificial Sequence: Synthetic probe"
gatgcgaacatagtacactgcagcc

SEQ ID NO: 428 - DNA, 25 bp, Artificial Sequence
  source: /note="Description of Artificial Sequence: Synthetic probe"
attacaagcatgcgccgacgatgcc

SEQ ID NO: 429 - DNA, 25 bp, Artificial Sequence
  source: /note="Description of Artificial Sequence: Synthetic probe"
gacgatgcccagaatccagaacttt

SEQ ID NO: 430 - DNA, 25 bp, Artificial Sequence
  source: /note="Description of Artificial Sequence: Synthetic probe"
ccttccaccctcagcggatgataat

SEQ ID NO: 431 - DNA, 25 bp, Artificial Sequence
  source: /note="Description of Artificial Sequence: Synthetic probe"
cagatgcaaaatcaccccttctgca

SEQ ID NO: 432 - DNA, 25 bp, Artificial Sequence
  source: /note="Description of Artificial Sequence: Synthetic probe"
gcctctttgcaaccgggtcagaatg

SEQ ID NO: 433 - DNA, 25 bp, Artificial Sequence
  source: /note="Description of Artificial Sequence: Synthetic probe"
gaatggcggcagtggagcatcgtca

SEQ ID NO: 434 - DNA, 25 bp, Artificial Sequence
  source: /note="Description of Artificial Sequence: Synthetic probe"
catcgtcattcttcaggattgccct

SEQ ID NO: 435 - DNA, 25 bp, Artificial Sequence
  source: /note="Description of Artificial Sequence: Synthetic probe"
tgataactccctgagcctcaagaca

SEQ ID NO: 436 - DNA, 25 bp, Artificial Sequence
  source: /note="Description of Artificial Sequence: Synthetic probe"
agctctaccctcagcggatgataat

SEQ ID NO: 437 - DNA, 25 bp, Artificial Sequence
  source: /note="Description of Artificial Sequence: Synthetic probe"
gacacctgcggagtgtctgctctat

SEQ ID NO: 438 - DNA, 25 bp, Artificial Sequence
  source: /note="Description of Artificial Sequence: Synthetic probe"
tgataatctcaagacacctcccgag

SEQ ID NO: 439 - DNA, 25 bp, Artificial Sequence
  source: /note="Description of Artificial Sequence: Synthetic probe"
gctccaccctcagcggatgataatc

SEQ ID NO: 440 - DNA, 25 bp, Artificial Sequence
  source: /note="Description of Artificial Sequence: Synthetic probe"
aagacacctcccgagtgtgtctgct

SEQ ID NO: 441 - DNA, 25 bp, Artificial Sequence
  source: /note="Description of Artificial Sequence: Synthetic probe"
gtggggctgagcaacatttttacat

SEQ ID NO: 442 - DNA, 25 bp, Artificial Sequence
  source: /note="Description of Artificial Sequence: Synthetic probe"
ttttacatttattccttccaagaag

SEQ ID NO: 443 - DNA, 25 bp, Artificial Sequence
  source: /note="Description of Artificial Sequence: Synthetic probe"
gaccatgatctcaatagtcagttac

SEQ ID NO: 444 - DNA, 25 bp, Artificial Sequence
  source: /note="Description of Artificial Sequence: Synthetic probe"
gtcagttactgatgctcctgaaccc

SEQ ID NO: 445 - DNA, 25 bp, Artificial Sequence
  source: /note="Description of Artificial Sequence: Synthetic probe"
tgaaccctatgtgtccatttctgca

SEQ ID NO: 446 - DNA, 25 bp, Artificial Sequence
  source: /note="Description of Artificial Sequence: Synthetic probe"
atgtgtccatttctgcacacacgta

SEQ ID NO: 447 - DNA, 25 bp, Artificial Sequence
  source: /note="Description of Artificial Sequence: Synthetic probe"
gcgtcacttctctgattatgtgccc

SEQ ID NO: 448 - DNA, 25 bp, Artificial Sequence
  source: /note="Description of Artificial Sequence: Synthetic probe"
gattatgtgccctggcagggaccag

SEQ ID NO: 449 - DNA, 25 bp, Artificial Sequence
  source: /note="Description of Artificial Sequence: Synthetic probe"
cagcgcccttgcacatgggcatggt

SEQ ID NO: 450 - DNA, 25 bp, Artificial Sequence
  source: /note="Description of Artificial Sequence: Synthetic probe"
tggttgaatctgaaaccctccttct

SEQ ID NO: 451 - DNA, 25 bp, Artificial Sequence
  source: /note="Description of Artificial Sequence: Synthetic probe"
ctccttctgtggcaacttgtactga

SEQ ID NO: 452 - DNA, 25 bp, Artificial Sequence
  source: /note="Description of Artificial Sequence: Synthetic probe"
tgtatttcttacaggcctacagaaa

SEQ ID NO: 453 - DNA, 25 bp, Artificial Sequence
  source: /note="Description of Artificial Sequence: Synthetic probe"
gatttgtgcccattcctaatatttt

SEQ ID NO: 454 - DNA, 25 bp, Artificial Sequence
  source: /note="Description of Artificial Sequence: Synthetic probe"
gtcaaggacgaatttgcacagtgat

SEQ ID NO: 455 - DNA, 25 bp, Artificial Sequence
  source: /note="Description of Artificial Sequence: Synthetic probe"
aagtatataatatgtcacctggcac

SEQ ID NO: 456 - DNA, 25 bp, Artificial Sequence
  source: /note="Description of Artificial Sequence: Synthetic probe"
cacctggcacattcattttctcagt

SEQ ID NO: 457 - DNA, 25 bp, Artificial Sequence
  source: /note="Description of Artificial Sequence: Synthetic probe"
aatgtccttatgcttttagagttgc

SEQ ID NO: 458 - DNA, 25 bp, Artificial Sequence
  source: /note="Description of Artificial Sequence: Synthetic probe"
tttggtagggtgagtgtttccactc

SEQ ID NO: 459 - DNA, 25 bp, Artificial Sequence
  source: /note="Description of Artificial Sequence: Synthetic probe"
atgcatggcaaatctgtcggtctcc

SEQ ID NO: 460 - DNA, 25 bp, Artificial Sequence
  source: /note="Description of Artificial Sequence: Synthetic probe"
gtcggtctccagttggttatctgaa

SEQ ID NO: 461 - DNA, 25 bp, Artificial Sequence
  source: /note="Description of Artificial Sequence: Synthetic probe"
gaatagtgtcaccaattccaccaag

SEQ ID NO: 462 - DNA, 25 bp, Artificial Sequence
  source: /note="Description of Artificial Sequence: Synthetic probe"
aattccaccaagacagtgctgagat

SEQ ID NO: 463 - DNA, 25 bp, Artificial Sequence
  source: /note="Description of Artificial Sequence: Synthetic probe"
ttggccttcggagcaggaagctaaa

SEQ ID NO: 464 - DNA, 25 bp, Artificial Sequence
  source: /note="Description of Artificial Sequence: Synthetic probe"
gaagacatccccgtgaagactttga

SEQ ID NO: 465 - DNA, 25 bp, Artificial Sequence
  source: /note="Description of Artificial Sequence: Synthetic probe"
gttaccaacaacagcagacttctag

SEQ ID NO: 466 - DNA, 25 bp, Artificial Sequence
  source: /note="Description of Artificial Sequence: Synthetic probe"
gcagacttctagcatgtacttatca

SEQ ID NO: 467 - DNA, 25 bp, Artificial Sequence
  source: /note="Description of Artificial Sequence: Synthetic probe"
tgagacctcacagtaatcttcacac

SEQ ID NO: 468 - DNA, 25 bp, Artificial Sequence
  source: /note="Description of Artificial Sequence: Synthetic probe"
cttcacacttaaccttagacaccta

SEQ ID NO: 469 - DNA, 25 bp, Artificial Sequence
  source: /note="Description of Artificial Sequence: Synthetic probe"
gacacctatgcagtcatgttgggag

SEQ ID NO: 470 - DNA, 25 bp, Artificial Sequence
  source: /note="Description of Artificial Sequence: Synthetic probe"
aggttacaatgttacttcagcccac

SEQ ID NO: 471 - DNA, 25 bp, Artificial Sequence
  source: /note="Description of Artificial Sequence: Synthetic probe"
tgttacttcagcccacagtttattt

SEQ ID NO: 472 - DNA, 25 bp, Artificial Sequence
  source: /note="Description of Artificial Sequence: Synthetic probe"
catattatatatttctgccacctgg

SEQ ID NO: 473 - DNA, 25 bp, Artificial Sequence
  source: /note="Description of Artificial Sequence: Synthetic probe"
tctgccacctggattttcctggata

SEQ ID NO: 474 - DNA, 25 bp, Artificial Sequence
  source: /note="Description of Artificial Sequence: Synthetic probe"
gacttggggagatggagttcttgtg

SEQ ID NO: 475 - DNA, 25 bp, Artificial Sequence
  source: /note="Description of Artificial Sequence: Synthetic probe"
tggagttcttgtgccatagtcacat

SEQ ID NO: 476 - DNA, 25 bp, Artificial Sequence
  source: /note="Description of Artificial Sequence: Synthetic probe"
tatggactctgcacatgaatcccac

SEQ ID NO: 477 - DNA, 25 bp, Artificial Sequence
  source: /note="Description of Artificial Sequence: Synthetic probe"
aatcccacccacatgtgacacatat

SEQ ID NO: 478 - DNA, 25 bp, Artificial Sequence
  source: /note="Description of Artificial Sequence: Synthetic probe"
acatatgcaccttgtgtctgtacac

SEQ ID NO: 479 - DNA, 25 bp, Artificial Sequence
  source: /note="Description of Artificial Sequence: Synthetic probe"
tgtgtagcctgtgcatgtatgtctt

SEQ ID NO: 480 - DNA, 25 bp, Artificial Sequence
  source: /note="Description of Artificial Sequence: Synthetic probe"
gcatgtatgtcttggacactgtaca

SEQ ID NO: 481 - DNA, 25 bp, Artificial Sequence
  source: /note="Description of Artificial Sequence: Synthetic probe"
cactgtacaaggtacccctttctgg

SEQ ID NO: 482 - DNA, 25 bp, Artificial Sequence
  source: /note="Description of Artificial Sequence: Synthetic probe"
gcctgggattgacagaagcttctgc

SEQ ID NO: 483 - DNA, 25 bp, Artificial Sequence
  source: /note="Description of Artificial Sequence: Synthetic probe"
gggccaggactttatctaatacctc

SEQ ID NO: 484 - DNA, 25 bp, Artificial Sequence
  source: /note="Description of Artificial Sequence: Synthetic probe"
ctttatctaatacctctgtgtgctc

SEQ ID NO: 485 - DNA, 25 bp, Artificial Sequence
  source: /note="Description of Artificial Sequence: Synthetic probe"
taggccatttggactctgccttcaa

SEQ ID NO: 486 - DNA, 25 bp, Artificial Sequence
  source: /note="Description of Artificial Sequence: Synthetic probe"
ggcagttcagtccacaggcatggaa

SEQ ID NO: 487 - DNA, 25 bp, Artificial Sequence
  source: /note="Description of Artificial Sequence: Synthetic probe"
ctggcccagggaatccagccatgac

SEQ ID NO: 488 - DNA, 25 bp, Artificial Sequence
  source: /note="Description of Artificial Sequence: Synthetic probe"
agtactcttaggtgccagtctggta

SEQ ID NO: 489 - DNA, 25 bp, Artificial Sequence
  source: /note="Description of Artificial Sequence: Synthetic probe"
gtaactgaactccctctggaggcag

SEQ ID NO: 490 - DNA, 25 bp, Artificial Sequence
  source: /note="Description of Artificial Sequence: Synthetic probe"
tcagggttcccttgaaagctttatt

SEQ ID NO: 491 - DNA, 25 bp, Artificial Sequence
  source: /note="Description of Artificial Sequence: Synthetic probe"
attctggatatctcaggagccccga

SEQ ID NO: 492 - DNA, 25 bp, Artificial Sequence
  source: /note="Description of Artificial Sequence: Synthetic probe"
ggagccccgaaattctagctctgac

SEQ ID NO: 493 - DNA, 25 bp, Artificial Sequence
  source: /note="Description of Artificial Sequence: Synthetic probe"
gctgtttccagtggtatgaccttgg

SEQ ID NO: 494 - DNA, 25 bp, Artificial Sequence
  source: /note="Description of Artificial Sequence: Synthetic probe"
agaagtcacttatcctcttggagcc

SEQ ID NO: 495 - DNA, 25 bp, Artificial Sequence
  source: /note="Description of Artificial Sequence: Synthetic probe"
atagggatgtgaggttctgctgagg

SEQ ID NO: 496 - DNA, 25 bp, Artificial Sequence
  source: /note="Description of Artificial Sequence: Synthetic probe"
ggtatcaactggagtgcggcgaagg

SEQ ID NO: 497 - DNA, 25 bp, Artificial Sequence
  source: /note="Description of Artificial Sequence: Synthetic probe"
cctccacatgcacctgctagtgggg

SEQ ID NO: 498 - DNA, 25 bp, Artificial Sequence
  source: /note="Description of Artificial Sequence: Synthetic probe"
acccacaagcgctgcgtcgtggaag

SEQ ID NO: 499 - DNA, 25 bp, Artificial Sequence
  source: /note="Description of Artificial Sequence: Synthetic probe"
gagggcaaccaccagtttgctaagt

SEQ ID NO: 500 - DNA, 25 bp, Artificial Sequence
  source: /note="Description of Artificial Sequence: Synthetic probe"
gggcagtgcgggtaattctctaacg

SEQ ID NO: 501 - DNA, 25 bp, Artificial Sequence
  source: /note="Description of Artificial Sequence: Synthetic probe"
ttctctaacgggccacaacaacaac

SEQ ID NO: 502 - DNA, 25 bp, Artificial Sequence
  source: /note="Description of Artificial Sequence: Synthetic probe"
gtgagttcttcgaattgtgctgaga

SEQ ID NO: 503 - DNA, 25 bp, Artificial Sequence
  source: /note="Description of Artificial Sequence: Synthetic probe"
tccagggagcctggtggtacgccga

SEQ ID NO: 504 - DNA, 25 bp, Artificial Sequence
  source: /note="Description of Artificial Sequence: Synthetic probe"
gactgtcatgcttcaaacctcaatg

SEQ ID NO: 505 - DNA, 25 bp, Artificial Sequence
  source: /note="Description of Artificial Sequence: Synthetic probe"
ctcaatggtctctacctcatgggac

SEQ ID NO: 506 - DNA, 25 bp, Artificial Sequence
  source: /note="Description of Artificial Sequence: Synthetic probe"
atgggaccccatgagagctatgcca

SEQ ID NO: 507 - DNA, 25 bp, Artificial Sequence
  source: /note="Description of Artificial Sequence: Synthetic probe"
gacaagcgttgagccactaagcaga

SEQ ID NO: 508 - DNA, 25 bp, Artificial Sequence
  source: /note="Description of Artificial Sequence: Synthetic probe"
taagcagaggaccttgggttcccaa

SEQ ID NO: 509 - DNA, 25 bp, Artificial Sequence
  source: /note="Description of Artificial Sequence: Synthetic probe"
tgagagggctgctgaccatttggtc

SEQ ID NO: 510 - DNA, 25 bp, Artificial Sequence
  source: /note="Description of Artificial Sequence: Synthetic probe"
gattcctgttgcctttatatccaaa

SEQ ID NO: 511 - DNA, 25 bp, Artificial Sequence
  source: /note="Description of Artificial Sequence: Synthetic probe"
ctttcttgaggttgtctgagtcttg

SEQ ID NO: 512 - DNA, 25 bp, Artificial Sequence
  source: /note="Description of Artificial Sequence: Synthetic probe"
ctgagtcttgggtctatgccttgaa

SEQ ID NO: 513 - DNA, 25 bp, Artificial Sequence
  source: /note="Description of Artificial Sequence: Synthetic probe"
aattattggacagtctcacctcctg

SEQ ID NO: 514 - DNA, 25 bp, Artificial Sequence
  source: /note="Description of Artificial Sequence: Synthetic probe"
cctcctgccatagggtcctgaatgt

SEQ ID NO: 515 - DNA, 25 bp, Artificial Sequence
  source: /note="Description of Artificial Sequence: Synthetic probe"
tttgctgtgtgttctggggcaacct

SEQ ID NO: 516 - DNA, 25 bp, Artificial Sequence
  source: /note="Description of Artificial Sequence: Synthetic probe"
ggaaattgtatttgccttctccact

SEQ ID NO: 517 - DNA, 25 bp, Artificial Sequence
  source: /note="Description of Artificial Sequence: Synthetic probe"
gatccgtgtgtaccatctttgtgat

SEQ ID NO: 518 - DNA, 25 bp, Artificial Sequence
  source: /note="Description of Artificial Sequence: Synthetic probe"
aacggccatttgggatgccagggtg

SEQ ID NO: 519 - DNA, 25 bp, Artificial Sequence
  source: /note="Description of Artificial Sequence: Synthetic probe"
gagacttgggtgggtgggcatctct

SEQ ID NO: 520 - DNA, 25 bp, Artificial Sequence
  source: /note="Description of Artificial Sequence: Synthetic probe"
tgacgcacaccctgggatggggcta

SEQ ID NO: 521 - DNA, 25 bp, Artificial Sequence
  source: /note="Description of Artificial Sequence: Synthetic probe"
gggctagtagagccttcaggcgcct

SEQ ID NO: 522 - DNA, 25 bp, Artificial Sequence
  source: /note="Description of Artificial Sequence: Synthetic probe"
actctggcgcactctagtggacagg

SEQ ID NO: 523 - DNA, 25 bp, Artificial Sequence
  source: /note="Description of Artificial Sequence: Synthetic probe"
gaacgccttccaggaacctgtggac

SEQ ID NO: 524 - DNA, 25 bp, Artificial Sequence
  source: /note="Description of Artificial Sequence: Synthetic probe"
ctaggggtgcagggacttccctttg

SEQ ID NO: 525 - DNA, 25 bp, Artificial Sequence
  source: /note="Description of Artificial Sequence: Synthetic probe"
cagaccgctggaaaacactgtcact

SEQ ID NO: 526 - DNA, 25 bp, Artificial Sequence
  source: /note="Description of Artificial Sequence: Synthetic probe"
aacactgtcactttcagagctcggt

SEQ ID NO: 527 - DNA, 25 bp, Artificial Sequence
  source: /note="Description of Artificial Sequence: Synthetic probe"
gcggacgagagaaatcgcggcccac

SEQ ID NO: 528 - DNA, 25 bp, Artificial Sequence
  source: /note="Description of Artificial Sequence: Synthetic probe"
ctgcatcttaaccttttgtatttat

SEQ ID NO: 529 - DNA, 25 bp, Artificial Sequence
  source: /note="Description of Artificial Sequence: Synthetic probe"
cagccacacgcgaaggtgaccttaa

SEQ ID NO: 530 - DNA, 25 bp, Artificial Sequence
  source: /note="Description of Artificial Sequence: Synthetic probe"
gaccttaaacttttacagctgacgg

SEQ ID NO: 531 - DNA, 25 bp, Artificial Sequence
  source: /note="Description of Artificial Sequence: Synthetic probe"
tatgtgactatccttcatctaccta

SEQ ID NO: 532 - DNA, 25 bp, Artificial Sequence
  source: /note="Description of Artificial Sequence: Synthetic probe"
ggaaccatgtgccaagttgcagggt

SEQ ID NO: 533 - DNA, 25 bp, Artificial Sequence
  source: /note="Description of Artificial Sequence: Synthetic probe"
gactcacaatagtgcatcttggtcc

SEQ ID NO: 534 - DNA, 25 bp, Artificial Sequence
  source: /note="Description of Artificial Sequence: Synthetic probe"
gcatcttggtccgatactctgagag

SEQ ID NO: 535 - DNA, 25 bp, Artificial Sequence
  source: /note="Description of Artificial Sequence: Synthetic probe"
tgctggaagcctccgaggtggaaga

SEQ ID NO: 536 - DNA, 25 bp, Artificial Sequence
  source: /note="Description of Artificial Sequence: Synthetic probe"
tgttgtgcgagggtgttttccgagg

SEQ ID NO: 537 - DNA, 25 bp, Artificial Sequence
  source: /note="Description of Artificial Sequence: Synthetic probe"
aataaatgcggagaccctcgtgggc

SEQ ID NO: 538 - DNA, 25 bp, Artificial Sequence
  source: /note="Description of Artificial Sequence: Synthetic probe"
ctggtgtctatattcttctctcaaa

SEQ ID NO: 539 - DNA, 25 bp, Artificial Sequence
  source: /note="Description of Artificial Sequence: Synthetic probe"
ctctcaaagaaacacctcaactgga

SEQ ID NO: 540 - DNA, 25 bp, Artificial Sequence
  source: /note="Description of Artificial Sequence: Synthetic probe"
aggcaattcagatatccccaaggct

SEQ ID NO: 541 - DNA, 25 bp, Artificial Sequence
  source: /note="Description of Artificial Sequence: Synthetic probe"
gtaggaccaacacccaggggatcag

SEQ ID NO: 542 - DNA, 25 bp, Artificial Sequence
  source: /note="Description of Artificial Sequence: Synthetic probe"
agatcagtgagagtgcaaccccacc

SEQ ID NO: 543 - DNA, 25 bp, Artificial Sequence
  source: /note="Description of Artificial Sequence: Synthetic probe"
caccctccacaggaaattgcctcat

SEQ ID NO: 544 - DNA, 25 bp, Artificial Sequence
  source: /note="Description of Artificial Sequence: Synthetic probe"
aattgcctcatgggcagggccacag

SEQ ID NO: 545 - DNA, 25 bp, Artificial Sequence
  source: /note="Description of Artificial Sequence: Synthetic probe"
ctgccacttttaatgggtcctccac

SEQ ID NO: 546 - DNA, 25 bp, Artificial Sequence
  source: /note="Description of Artificial Sequence: Synthetic probe"
ggcattattctccagccttaagatc

SEQ ID NO: 547 - DNA, 25 bp, Artificial Sequence
  source: /note="Description of Artificial Sequence: Synthetic probe"
gatcttaggacgtttcctttgctat

SEQ ID NO: 548 - DNA, 25 bp, Artificial Sequence
  source: /note="Description of Artificial Sequence: Synthetic probe"
gatttgtacttgcttgagtcccatg

SEQ ID NO: 549 - DNA, 25 bp, Artificial Sequence
  source: /note="Description of Artificial Sequence: Synthetic probe"
ttgagtcccatgactgtttctcttc

SEQ ID NO: 550 - DNA, 25 bp, Artificial Sequence
  source: /note="Description of Artificial Sequence: Synthetic probe"
atcctatgtttgtcccactattgta

SEQ ID NO: 551 - DNA, 25 bp, Artificial Sequence
  source: /note="Description of Artificial Sequence: Synthetic probe"
agacctcgagttcagccaaaacctc

SEQ ID NO: 552 - DNA, 25 bp, Artificial Sequence
  source: /note="Description of Artificial Sequence: Synthetic probe"
ggcagcagaaaactcattgtcccct

SEQ ID NO: 553 - DNA, 25 bp, Artificial Sequence
  source: /note="Description of Artificial Sequence: Synthetic probe"
aaaagcactgtggatttctgccctc

SEQ ID NO: 554 - DNA, 25 bp, Artificial Sequence
  source: /note="Description of Artificial Sequence: Synthetic probe"
ctgatgtgcatatccgtacttccat

SEQ ID NO: 555 - DNA, 25 bp, Artificial Sequence
  source: /note="Description of Artificial Sequence: Synthetic probe"
gtacttccatgaggtgttttctgtg

SEQ ID NO: 556 - DNA, 25 bp, Artificial Sequence
  source: /note="Description of Artificial Sequence: Synthetic probe"
tgtgcagaacattgtcacctcctga

SEQ ID NO: 557 - DNA, 25 bp, Artificial Sequence
  source: /note="Description of Artificial Sequence: Synthetic probe"
gagtttttggtctcctcagagagct

SEQ ID NO: 558 - DNA, 25 bp, Artificial Sequence
  source: /note="Description of Artificial Sequence: Synthetic probe"
agagctccatcacaccagtaaggag

SEQ ID NO: 559 - DNA, 25 bp, Artificial Sequence
  source: /note="Description of Artificial Sequence: Synthetic probe"
aatcttagagatttcttgtcccctc

SEQ ID NO: 560 - DNA, 25 bp, Artificial Sequence
  source: /note="Description of Artificial Sequence: Synthetic probe"
tcccctctcaggtcatgtgtagatg

SEQ ID NO: 561 - DNA, 25 bp, Artificial Sequence
  source: /note="Description of Artificial Sequence: Synthetic probe"
gtctcactacaagcagcctatctgc

SEQ ID NO: 562 - DNA, 25 bp, Artificial Sequence
  source: /note="Description of Artificial Sequence: Synthetic probe"
agcccctgcccatctgggaaaatac

SEQ ID NO: 563 - DNA, 25 bp, Artificial Sequence
  source: /note="Description of Artificial Sequence: Synthetic probe"
gaaaataccccatcattcatgctac

SEQ ID NO: 564 - DNA, 25 bp, Artificial Sequence
  source: /note="Description of Artificial Sequence: Synthetic probe"
ggctatgggagcagcttttttttcc

SEQ ID NO: 565 - DNA, 25 bp, Artificial Sequence
  source: /note="Description of Artificial Sequence: Synthetic probe"
gtcatccaatctaaccacatcaata

SEQ ID NO: 566 - DNA, 25 bp, Artificial Sequence
  source: /note="Description of Artificial Sequence: Synthetic probe"
cttgttcacactctcacatgtttag

SEQ ID NO: 567 - DNA, 25 bp, Artificial Sequence
  source: /note="Description of Artificial Sequence: Synthetic probe"
ttataatctgatttgttttcctctt

SEQ ID NO: 568 - DNA, 25 bp, Artificial Sequence
  source: /note="Description of Artificial Sequence: Synthetic probe"
gaccacaaatagtgctcgctttcta

SEQ ID NO: 569 - DNA, 25 bp, Artificial Sequence
  source: /note="Description of Artificial Sequence: Synthetic probe"
gtgctcgctttctatgtagtttggt

SEQ ID NO: 570 - DNA, 25 bp, Artificial Sequence
  source: /note="Description of Artificial Sequence: Synthetic probe"
gaagactctaccagactgtgtattc

SEQ ID NO: 571 - DNA, 25 bp, Artificial Sequence
  source: /note="Description of Artificial Sequence: Synthetic probe"
tgttccttcaagatcatgtacccca

SEQ ID NO: 572 - DNA, 25 bp, Artificial Sequence
  source: /note="Description of Artificial Sequence: Synthetic probe"
gtaccccaatttacttgccattact

SEQ ID NO: 573 - DNA, 25 bp, Artificial Sequence
  source: /note="Description of Artificial Sequence: Synthetic probe"
aggtccgagccatcctagaggatct

SEQ ID NO: 574 - DNA, 25 bp, Artificial Sequence
  source: /note="Description of Artificial Sequence: Synthetic probe"
ctagaggatctggggctacccctga

SEQ ID NO: 575 - DNA, 25 bp, Artificial Sequence
  source: /note="Description of Artificial Sequence: Synthetic probe"
tgacctcagatgacgccctgatggt

SEQ ID NO: 576 - DNA, 25 bp, Artificial Sequence
  source: /note="Description of Artificial Sequence: Synthetic probe"
gacgccctgatggtgctagaggtgt

SEQ ID NO: 577 - DNA, 25 bp, Artificial Sequence
  source: /note="Description of Artificial Sequence: Synthetic probe"
ggtgtagctgccgtggtggagaaga

SEQ ID NO: 578 - DNA, 25 bp, Artificial Sequence
  source: /note="Description of Artificial Sequence: Synthetic probe"
gtctgtgggggtggatggaacgctc

SEQ ID NO: 579 - DNA, 25 bp, Artificial Sequence
  source: /note="Description of Artificial Sequence: Synthetic probe"
gatggaacgctctacaagctgcacc

SEQ ID NO: 580 - DNA, 25 bp, Artificial Sequence
  source: /note="Description of Artificial Sequence: Synthetic probe"
ggatgggtccggcaaaggtgcggcc

SEQ ID NO: 581 - DNA, 25 bp, Artificial Sequence
  source: /note="Description of Artificial Sequence: Synthetic probe"
tgactcgtgtctgaggaaacctcca

SEQ ID NO: 582 - DNA, 25 bp, Artificial Sequence
  source: /note="Description of Artificial Sequence: Synthetic probe"
gactcctgggacatcccatgtgtga

SEQ ID NO: 583 - DNA, 25 bp, Artificial Sequence
  source: /note="Description of Artificial Sequence: Synthetic probe"
gaagtagcactcaggttagcaatat

SEQ ID NO: 584 - DNA, 25 bp, Artificial Sequence
  source: /note="Description of Artificial Sequence: Synthetic probe"
gatggattccagccaaccagaaaga

SEQ ID NO: 585 - DNA, 25 bp, Artificial Sequence
  source: /note="Description of Artificial Sequence: Synthetic probe"
ggcagcggaccagtgaaagccgtga

SEQ ID NO: 586 - DNA, 25 bp, Artificial Sequence
  source: /note="Description of Artificial Sequence: Synthetic probe"
aaagccgtgatttatgtcacatggc

SEQ ID NO: 587 - DNA, 25 bp, Artificial Sequence
  source: /note="Description of Artificial Sequence: Synthetic probe"
aagactgtgatgatcagccacctaa

SEQ ID NO: 588 - DNA, 25 bp, Artificial Sequence
  source: /note="Description of Artificial Sequence: Synthetic probe"
gaaaaagaaacgctccaaggccaag

SEQ ID NO: 589 - DNA, 25 bp, Artificial Sequence
  source: /note="Description of Artificial Sequence: Synthetic probe"
gggaagcttcacctgttgagtttgc

SEQ ID NO: 590 - DNA, 25 bp, Artificial Sequence
  source: /note="Description of Artificial Sequence: Synthetic probe"
gatcctaatgaacctacatactgct

SEQ ID NO: 591 - DNA, 25 bp, Artificial Sequence
  source: /note="Description of Artificial Sequence: Synthetic probe"
tactgcttatgcaaccaagtgtctt

SEQ ID NO: 592 - DNA, 25 bp, Artificial Sequence
  source: /note="Description of Artificial Sequence: Synthetic probe"
tttcatgtgtttcacttacctataa

SEQ ID NO: 593 - DNA, 25 bp, Artificial Sequence
  source: /note="Description of Artificial Sequence: Synthetic probe"
ggggaaatggtattgcccaaagtgc

SEQ ID NO: 594 - DNA, 25 bp, Artificial Sequence
  source: /note="Description of Artificial Sequence: Synthetic probe"
gaggtagtaaaggccatccacattt

SEQ ID NO: 595 - DNA, 25 bp, Artificial Sequence
  source: /note="Description of Artificial Sequence: Synthetic probe"
gctgacatcctgcgagactacaaag

SEQ ID NO: 596 - DNA, 25 bp, Artificial Sequence
  source: /note="Description of Artificial Sequence: Synthetic probe"
tcctgaaaaccctctgaagtaccta

SEQ ID NO: 597 - DNA, 25 bp, Artificial Sequence
  source: /note="Description of Artificial Sequence: Synthetic probe"
gaagtacctatatcctgacattccc

SEQ ID NO: 598 - DNA, 25 bp, Artificial Sequence
  source: /note="Description of Artificial Sequence: Synthetic probe"
caaagccttcggtaaacactacagc

SEQ ID NO: 599 - DNA, 25 bp, Artificial Sequence
  source: /note="Description of Artificial Sequence: Synthetic probe"
gctctcagccttgcgaagtttcaag

SEQ ID NO: 600 - DNA, 25 bp, Artificial Sequence
  source: /note="Description of Artificial Sequence: Synthetic probe"
tccccatctcaacaatccgaagtga

SEQ ID NO: 601 - DNA, 25 bp, Artificial Sequence
  source: /note="Description of Artificial Sequence: Synthetic probe"
aaacctgagtcccacaacaattgaa

SEQ ID NO: 602 - DNA, 25 bp, Artificial Sequence
  source: /note="Description of Artificial Sequence: Synthetic probe"
tgcaatgaagtctccttattctgct

SEQ ID NO: 603 - DNA, 25 bp, Artificial Sequence
  source: /note="Description of Artificial Sequence: Synthetic probe"
agactgttctttgcccaataaccac

SEQ ID NO: 604 - DNA, 25 bp, Artificial Sequence
  source: /note="Description of Artificial Sequence: Synthetic probe"
gacatctgaagctctcttcacactc

SEQ ID NO: 605 - DNA, 25 bp, Artificial Sequence
  source: /note="Description of Artificial Sequence: Synthetic probe"
tcccgtggcactcctcaattgggag

SEQ ID NO: 606 - DNA, 25 bp, Artificial Sequence
  source: /note="Description of Artificial Sequence: Synthetic probe"
gaggagctgcattatgcttccctca

SEQ ID NO: 607 - DNA, 25 bp, Artificial Sequence
  source: /note="Description of Artificial Sequence: Synthetic probe"
atgcttccctcaactttcatgggat

SEQ ID NO: 608 - DNA, 25 bp, Artificial Sequence
  source: /note="Description of Artificial Sequence: Synthetic probe"
atgaatccttccaaggacacctcca

SEQ ID NO: 609 - DNA, 25 bp, Artificial Sequence
  source: /note="Description of Artificial Sequence: Synthetic probe"
gacacctccaccgaatactcagagg

SEQ ID NO: 610 - DNA, 25 bp, Artificial Sequence
  source: /note="Description of Artificial Sequence: Synthetic probe"
aggaaccctcaagagcatcaggctc

SEQ ID NO: 611 - DNA, 25 bp, Artificial Sequence
  source: /note="Description of Artificial Sequence: Synthetic probe"
tagaagatccacatcctctacaggt

SEQ ID NO: 612 - DNA, 25 bp, Artificial Sequence
  source: /note="Description of Artificial Sequence: Synthetic probe"
aggtcggggaccaaaggctgattct

SEQ ID NO: 613 - DNA, 25 bp, Artificial Sequence
  source: /note="Description of Artificial Sequence: Synthetic probe"
ggaatcaaatctgtgctctttcatt

SEQ ID NO: 614 - DNA, 25 bp, Artificial Sequence
  source: /note="Description of Artificial Sequence: Synthetic probe"
agtgggcagcaatgacacccaccct

SEQ ID NO: 615 - DNA, 25 bp, Artificial Sequence
  source: /note="Description of Artificial Sequence: Synthetic probe"
agaactccaagttacatggccccac

SEQ ID NO: 616 - DNA, 25 bp, Artificial Sequence
  source: /note="Description of Artificial Sequence: Synthetic probe"
aaacctcaagctgttcaggtgccgc

SEQ ID NO: 617 - DNA, 25 bp, Artificial Sequence
  source: /note="Description of Artificial Sequence: Synthetic probe"
tgcaggtgtaccgctgggtgtgtga

SEQ ID NO: 618 - DNA, 25 bp, Artificial Sequence
  source: /note="Description of Artificial Sequence: Synthetic probe"
atgccaccggcgaggtggcctgacc

SEQ ID NO: 619 - DNA, 25 bp, Artificial Sequence
  source: /note="Description of Artificial Sequence: Synthetic probe"
ggtagtttaagagtccctgaccctg

SEQ ID NO: 620 - DNA, 25 bp, Artificial Sequence
  source: /note="Description of Artificial Sequence: Synthetic probe"
ccctggaggactgagatcccacctc

SEQ ID NO: 621 - DNA, 25 bp, Artificial Sequence
  source: /note="Description of Artificial Sequence: Synthetic probe"
ttattataatcgtcagcctcttcaa

SEQ ID NO: 622 - DNA, 25 bp, Artificial Sequence
  source: /note="Description of Artificial Sequence: Synthetic probe"
ggagaacgcacacctggtggtcatc

SEQ ID NO: 623 - DNA, 25 bp, Artificial Sequence
  source: /note="Description of Artificial Sequence: Synthetic probe"
tcattgtacaacacacgaacccctt

SEQ ID NO: 624 - DNA, 25 bp, Artificial Sequence
  source: /note="Description of Artificial Sequence: Synthetic probe"
gaaccccttcaatacctggataggt

SEQ ID NO: 625 - DNA, 25 bp, Artificial Sequence
  source: /note="Description of Artificial Sequence: Synthetic probe"
taattggcacgggcacgagctgggt

SEQ ID NO: 626 - DNA, 25 bp, Artificial Sequence
  source: /note="Description of Artificial Sequence: Synthetic probe"
tgttgaagtccagccggatggccgc

SEQ ID NO: 627 - DNA, 25 bp, Artificial Sequence
  source: /note="Description of Artificial Sequence: Synthetic probe"
ggccgctggaacgatgacttctgcc

SEQ ID NO: 628 - DNA, 25 bp, Artificial Sequence
  source: /note="Description of Artificial Sequence: Synthetic probe"
gccgagcggaaggggctagactcaa

SEQ ID NO: 629 - DNA, 25 bp, Artificial Sequence
  source: /note="Description of Artificial Sequence: Synthetic probe"
gaaggggctagactcaagccggctg

SEQ ID NO: 630 - DNA, 25 bp, Artificial Sequence
  source: /note="Description of Artificial Sequence: Synthetic probe"
gttcaccagcaagtcggatgtctgg

SEQ ID NO: 631 - DNA, 25 bp, Artificial Sequence
  source: /note="Description of Artificial Sequence: Synthetic probe"
gcaagtcggatgtctggagttttgg

SEQ ID NO: 632 - DNA, 25 bp, Artificial Sequence
  source: /note="Description of Artificial Sequence: Synthetic probe"
ctctgggaggtcttctcatatggac

SEQ ID NO: 633 - DNA, 25 bp, Artificial Sequence
  source: /note="Description of Artificial Sequence: Synthetic probe"
tcttctcatatggacgggctccgta

SEQ ID NO: 634 - DNA, 25 bp, Artificial Sequence
  source: /note="Description of Artificial Sequence: Synthetic probe"
gctccgtaccctaaaatgtcactga

SEQ ID NO: 635 - DNA, 25 bp, Artificial Sequence
  source: /note="Description of Artificial Sequence: Synthetic probe"
ctgaaagaggtgtcggaggccgtgg

SEQ ID NO: 636 - DNA, 25 bp, Artificial Sequence
  source: /note="Description of Artificial Sequence: Synthetic probe"
aggccgtggagaaggggtaccgcat

SEQ ID NO: 637 - DNA, 25 bp, Artificial Sequence
  source: /note="Description of Artificial Sequence: Synthetic probe"
ccgtctcagggcaggacgccgacgg

SEQ ID NO: 638 - DNA, 25 bp, Artificial Sequence
  source: /note="Description of Artificial Sequence: Synthetic probe"
agtggagagtgcggcgtgggggcac

SEQ ID NO: 639 - DNA, 25 bp, Artificial Sequence
  source: /note="Description of Artificial Sequence: Synthetic probe"
ctaccgctgggtctgcgagacagag

SEQ ID NO: 640 - DNA, 25 bp, Artificial Sequence
  source: /note="Description of Artificial Sequence: Synthetic probe"
gggtctgcgagacagagctggacaa

SEQ ID NO: 641 - DNA, 25 bp, Artificial Sequence
  source: /note="Description of Artificial Sequence: Synthetic probe"
tgccgcaggggtccgggattgggaa

SEQ ID NO: 642 - DNA, 25 bp, Artificial Sequence
  source: /note="Description of Artificial Sequence: Synthetic probe"
tcttctgctttctcgggaattttca

SEQ ID NO: 643 - DNA, 25 bp, Artificial Sequence
  source: /note="Description of Artificial Sequence: Synthetic probe"
ctcgggaattttcatctaggatttt

SEQ ID NO: 644 - DNA, 25 bp, Artificial Sequence
  source: /note="Description of Artificial Sequence: Synthetic probe"
gatagggtgatgttccgaaggtgag

SEQ ID NO: 645 - DNA, 25 bp, Artificial Sequence
  source: /note="Description of Artificial Sequence: Synthetic probe"
ggtgaggagcttgaaacccgtggcg

SEQ ID NO: 646 - DNA, 25 bp, Artificial Sequence
  source: /note="Description of Artificial Sequence: Synthetic probe"
aggagcagaaatttgtccagcacca

SEQ ID NO: 647 - DNA, 25 bp, Artificial Sequence
  source: /note="Description of Artificial Sequence: Synthetic probe"
gaaatttgtccagcaccacataggc

SEQ ID NO: 648 - DNA, 25 bp, Artificial Sequence
  source: /note="Description of Artificial Sequence: Synthetic probe"
ccacataggccctgtgaacacctgg

SEQ ID NO: 649 - DNA, 25 bp, Artificial Sequence
  source: /note="Description of Artificial Sequence: Synthetic probe"
gagcagccggacgactggtacggcc

SEQ ID NO: 650 - DNA, 25 bp, Artificial Sequence
  source: /note="Description of Artificial Sequence: Synthetic probe"
tagccccaggaacccttgaggttct

SEQ ID NO: 651 - DNA, 25 bp, Artificial Sequence
  source: /note="Description of Artificial Sequence: Synthetic probe"
ttgaggttcttcttcacaaggctga

SEQ ID NO: 652 - DNA, 25 bp, Artificial Sequence
  source: /note="Description of Artificial Sequence: Synthetic probe"
gacgagtgtcattcatcacttcagt

SEQ ID NO: 653 - DNA, 25 bp, Artificial Sequence
  source: /note="Description of Artificial Sequence: Synthetic probe"
tcacttcagtgatccatgcatagaa

SEQ ID NO: 654 - DNA, 25 bp, Artificial Sequence
  source: /note="Description of Artificial Sequence: Synthetic probe"
gggactcccttgaagaatttcatgt

SEQ ID NO: 655 - DNA, 25 bp, Artificial Sequence
  source: /note="Description of Artificial Sequence: Synthetic probe"
gtttttgggctgtatagctctttac

SEQ ID NO: 656 - DNA, 25 bp, Artificial Sequence
  source: /note="Description of Artificial Sequence: Synthetic probe"
agctcacctttgaacagatcccggt

SEQ ID NO: 657 - DNA, 25 bp, Artificial Sequence
  source: /note="Description of Artificial Sequence: Synthetic probe"
tcccggtgacattctatttccagga

SEQ ID NO: 658 - DNA, 25 bp, Artificial Sequence
  source: /note="Description of Artificial Sequence: Synthetic probe"
gagattggacagtttcagaggcctt

SEQ ID NO: 659 - DNA, 25 bp, Artificial Sequence
  source: /note="Description of Artificial Sequence: Synthetic probe"
tcagaggccttattttgtcatacta

SEQ ID NO: 660 - DNA, 25 bp, Artificial Sequence
  source: /note="Description of Artificial Sequence: Synthetic probe"
gtcatactaagtgtctcctgtaatt

SEQ ID NO: 661 - DNA, 25 bp, Artificial Sequence
  source: /note="Description of Artificial Sequence: Synthetic probe"
ggaacttccaaatgctgagcccaga

SEQ ID NO: 662 - DNA, 25 bp, Artificial Sequence
  source: /note="Description of Artificial Sequence: Synthetic probe"
agcccagatccaaagttgtctcctg

SEQ ID NO: 663 - DNA, 25 bp, Artificial Sequence
  source: /note="Description of Artificial Sequence: Synthetic probe"
ccacgagcaccacagtcaggtcttg

SEQ ID NO: 664 - DNA, 25 bp, Artificial Sequence
  source: /note="Description of Artificial Sequence: Synthetic probe"
cagtctgcatcttaggggatcgctc

SEQ ID NO: 665 - DNA, 25 bp, Artificial Sequence
  source: /note="Description of Artificial Sequence: Synthetic probe"
acaccacgaatctgaacatgcctct

SEQ ID NO: 666 - DNA, 25 bp, Artificial Sequence
  source: /note="Description of Artificial Sequence: Synthetic probe"
aaggtatctatttcacttgacccct

SEQ ID NO: 667 - DNA, 25 bp, Artificial Sequence
  source: /note="Description of Artificial Sequence: Synthetic probe"
tctccaacctaactggcttacttcc

SEQ ID NO: 668 - DNA, 25 bp, Artificial Sequence
  source: /note="Description of Artificial Sequence: Synthetic probe"
cttcctagtcctacttgaggctgca

SEQ ID NO: 669 - DNA, 25 bp, Artificial Sequence
  source: /note="Description of Artificial Sequence: Synthetic probe"
aacacggcacttacacacttgctgt

SEQ ID NO: 670 - DNA, 25 bp, Artificial Sequence
  source: /note="Description of Artificial Sequence: Synthetic probe"
tatctttcagccttctgtcatcagt

SEQ ID NO: 671 - DNA, 25 bp, Artificial Sequence
  source: /note="Description of Artificial Sequence: Synthetic probe"
tataacttcagtgtagctctctcct

SEQ ID NO: 672 - DNA, 25 bp, Artificial Sequence
  source: /note="Description of Artificial Sequence: Synthetic probe"
caccctgtcctacggaagagctggt

SEQ ID NO: 673 - DNA, 25 bp, Artificial Sequence
  source: /note="Description of Artificial Sequence: Synthetic probe"
ctcccagctgcattctgagaactct

SEQ ID NO: 674 - DNA, 25 bp, Artificial Sequence
  source: /note="Description of Artificial Sequence: Synthetic probe"
gaactctgtgattgggcaaggccct

SEQ ID NO: 675 - DNA, 25 bp, Artificial Sequence
  source: /note="Description of Artificial Sequence: Synthetic probe"
tcccccacaatctttctagacaggt

SEQ ID NO: 676 - DNA, 25 bp, Artificial Sequence
  source: /note="Description of Artificial Sequence: Synthetic probe"
aagcaaatgcggagcctgctccctc

SEQ ID NO: 677 - DNA, 25 bp, Artificial Sequence
  source: /note="Description of Artificial Sequence: Synthetic probe"
ctccctcctaagaagatcccaagaa

SEQ ID NO: 678 - DNA, 25 bp, Artificial Sequence
  source: /note="Description of Artificial Sequence: Synthetic probe"
caatggctcagtccttggtgatcta

SEQ ID NO: 679 - DNA, 25 bp, Artificial Sequence
  source: /note="Description of Artificial Sequence: Synthetic probe"
gtgcaaggagggccctgttagctcc

SEQ ID NO: 680 - DNA, 25 bp, Artificial Sequence
  source: /note="Description of Artificial Sequence: Synthetic probe"
tcctggagtctaatttccttggccc

SEQ ID NO: 681 - DNA, 25 bp, Artificial Sequence
  source: /note="Description of Artificial Sequence: Synthetic probe"
ctctgagccttttgagtctgggccc

SEQ ID NO: 682 - DNA, 25 bp, Artificial Sequence
  source: /note="Description of Artificial Sequence: Synthetic probe"
gtttgttgattcttgtctggctaat

SEQ ID NO: 683 - DNA, 25 bp, Artificial Sequence
  source: /note="Description of Artificial Sequence: Synthetic probe"
aacagaacagctttcaccaaagtgg

SEQ ID NO: 684 - DNA, 25 bp, Artificial Sequence
  source: /note="Description of Artificial Sequence: Synthetic probe"
gtgggtagtatagtcctcaaatatc

SEQ ID NO: 685 - DNA, 25 bp, Artificial Sequence
  source: /note="Description of Artificial Sequence: Synthetic probe"
atatatgcgtttttgtaccccagaa

SEQ ID NO: 686 - DNA, 25 bp, Artificial Sequence
  source: /note="Description of Artificial Sequence: Synthetic probe"
gacagccagatccagtgattgactt

SEQ ID NO: 687 - DNA, 25 bp, Artificial Sequence
  source: /note="Description of Artificial Sequence: Synthetic probe"
caacaacatccatacagcactgctg

SEQ ID NO: 688 - DNA, 25 bp, Artificial Sequence
  source: /note="Description of Artificial Sequence: Synthetic probe"
aagagcaccacagactacaactgcc

SEQ ID NO: 689 - DNA, 25 bp, Artificial Sequence
  source: /note="Description of Artificial Sequence: Synthetic probe"
tacaactgcccagcttcatctaaat

SEQ ID NO: 690 - DNA, 25 bp, Artificial Sequence
  source: /note="Description of Artificial Sequence: Synthetic probe"
gcccagcttcatctaaatacttgtt

SEQ ID NO: 691 - DNA, 25 bp, Artificial Sequence
  source: /note="Description of Artificial Sequence: Synthetic probe"
aatacttgttaacctctttggtcat

SEQ ID NO: 692 - DNA, 25 bp, Artificial Sequence
  source: /note="Description of Artificial Sequence: Synthetic probe"
tcagtgtaatccttgactttgctcc

SEQ ID NO: 693 - DNA, 25 bp, Artificial Sequence
  source: /note="Description of Artificial Sequence: Synthetic probe"
ttccctcctaagctccagtaaataa

SEQ ID NO: 694 - DNA, 25 bp, Artificial Sequence
  source: /note="Description of Artificial Sequence: Synthetic probe"
ataccaagaaaatgccccaggcctt

SEQ ID NO: 695 - DNA, 25 bp, Artificial Sequence
  source: /note="Description of Artificial Sequence: Synthetic probe"
ttcctgctccttgccaaaactggaa

SEQ ID NO: 696 - DNA, 25 bp, Artificial Sequence
  source: /note="Description of Artificial Sequence: Synthetic probe"
ccaggacagcagcttccatctatga

SEQ ID NO: 697 - DNA, 25 bp, Artificial Sequence
  source: /note="Description of Artificial Sequence: Synthetic probe"
ttcttagcttcctccaggagctgct

SEQ ID NO: 698 - DNA, 25 bp, Artificial Sequence
  source: /note="Description of Artificial Sequence: Synthetic probe"
gggttgatggagagtccccaaggcc

SEQ ID NO: 699 - DNA, 25 bp, Artificial Sequence
  source: /note="Description of Artificial Sequence: Synthetic probe"
gaagcctgagccagagaaccagcta

SEQ ID NO: 700 - DNA, 25 bp, Artificial Sequence
  source: /note="Description of Artificial Sequence: Synthetic probe"
ggatggggtccctgatgaatatctg

SEQ ID NO: 701 - DNA, 25 bp, Artificial Sequence
  source: /note="Description of Artificial Sequence: Synthetic probe"
aatatctggagacctcgacagcctg

SEQ ID NO: 702 - DNA, 25 bp, Artificial Sequence
  source: /note="Description of Artificial Sequence: Synthetic probe"
gggtgggtcaggacaaaggcctctc

SEQ ID NO: 703 - DNA, 25 bp, Artificial Sequence
  source: /note="Description of Artificial Sequence: Synthetic probe"
gcctctcatcaccgcagaaagcggg

SEQ ID NO: 704 - DNA, 25 bp, Artificial Sequence
  source: /note="Description of Artificial Sequence: Synthetic probe"
agtgaatgggcctgtggcccacctg

SEQ ID NO: 705 - DNA, 25 bp, Artificial Sequence
  source: /note="Description of Artificial Sequence: Synthetic probe"
gggttcaggccaggtcttttgatgg

SEQ ID NO: 706 - DNA, 25 bp, Artificial Sequence
  source: /note="Description of Artificial Sequence: Synthetic probe"
ccaggtcttttgatggccaggagta

SEQ ID NO: 707 - DNA, 25 bp, Artificial Sequence
  source: /note="Description of Artificial Sequence: Synthetic probe"
ggccaggagtagatgacagggagtt

SEQ ID NO: 708 - DNA, 25 bp, Artificial Sequence
  source: /note="Description of Artificial Sequence: Synthetic probe"
tgccttggggaacctttggtgtgcc

SEQ ID NO: 709 - DNA, 25 bp, Artificial Sequence
  source: /note="Description of Artificial Sequence: Synthetic probe"
tggggaacctttggtgtgccaagag

SEQ ID NO: 710 - DNA, 25 bp, Artificial Sequence
  source: /note="Description of Artificial Sequence: Synthetic probe"
ggtagatgggagtggggctcggtcc

SEQ ID NO: 711 - DNA, 25 bp, Artificial Sequence
  source: /note="Description of Artificial Sequence: Synthetic probe"
tagatgggagtggggctcggtcccc

SEQ ID NO: 712 - DNA, 25 bp, Artificial Sequence
  source: /note="Description of Artificial Sequence: Synthetic probe"
gtggtttgaatgtttgagtcccaac

SEQ ID NO: 713 - DNA, 25 bp, Artificial Sequence
  source: /note="Description of Artificial Sequence: Synthetic probe"
gagtcccaacaaaattcatatcaaa

SEQ ID NO: 714 - DNA, 25 bp, Artificial Sequence
  source: /note="Description of Artificial Sequence: Synthetic probe"
acataatcccaactgggtgcagtgg

SEQ ID NO: 715 - DNA, 25 bp, Artificial Sequence
  source: /note="Description of Artificial Sequence: Synthetic probe"
taggtcaggaaatccagaccgtcct

SEQ ID NO: 716 - DNA, 25 bp, Artificial Sequence
  source: /note="Description of Artificial Sequence: Synthetic probe"
cccttccaactatgtccagatgtgc

SEQ ID NO: 717 - DNA, 25 bp, Artificial Sequence
  source: /note="Description of Artificial Sequence: Synthetic probe"
tcctctctggactttctccaaaggc

SEQ ID NO: 718 - DNA, 25 bp, Artificial Sequence
  source: /note="Description of Artificial Sequence: Synthetic probe"
ccggccttgtgacattcactcagag

SEQ ID NO: 719 - DNA, 25 bp, Artificial Sequence
  source: /note="Description of Artificial Sequence: Synthetic probe"
agaagaccacaccaaggaggggccg

SEQ ID NO: 720 - DNA, 25 bp, Artificial Sequence
  source: /note="Description of Artificial Sequence: Synthetic probe"
aggaaagtagtccaggctgtccctg

SEQ ID NO: 721 - DNA, 25 bp, Artificial Sequence
  source: /note="Description of Artificial Sequence: Synthetic probe"
gctgtccctgaaactgagtctgtgg

SEQ ID NO: 722 - DNA, 25 bp, Artificial Sequence
  source: /note="Description of Artificial Sequence: Synthetic probe"
gtgttttcgtcacaggagtctttgt

SEQ ID NO: 723 - DNA, 25 bp, Artificial Sequence
  source: /note="Description of Artificial Sequence: Synthetic probe"
cagttgatgtcgatgctcactgctt

SEQ ID NO: 724 - DNA, 25 bp, Artificial Sequence
  source: /note="Description of Artificial Sequence: Synthetic probe"
ggtgtatttttattttcctgtgact

SEQ ID NO: 725 - DNA, 25 bp, Artificial Sequence
  source: /note="Description of Artificial Sequence: Synthetic probe"
tctctacccactatgcacagattaa

SEQ ID NO: 726 - DNA, 25 bp, Artificial Sequence
  source: /note="Description of Artificial Sequence: Synthetic probe"
gattaaacttcacctacaaactcct

SEQ ID NO: 727 - DNA, 25 bp, Artificial Sequence
  source: /note="Description of Artificial Sequence: Synthetic probe"
agaatacaagccactaccttctgac

SEQ ID NO: 728 - DNA, 25 bp, Artificial Sequence
  source: /note="Description of Artificial Sequence: Synthetic probe"
tgctgtggggcatagaactccggaa

SEQ ID NO: 729 - DNA, 25 bp, Artificial Sequence
  source: /note="Description of Artificial Sequence: Synthetic probe"
tgatattttcagagtcttgtccccg

SEQ ID NO: 730 - DNA, 25 bp, Artificial Sequence
  source: /note="Description of Artificial Sequence: Synthetic probe"
tcttgtccccggggtattagcacct

SEQ ID NO: 731 - DNA, 25 bp, Artificial Sequence
  source: /note="Description of Artificial Sequence: Synthetic probe"
ggtattagcacctctttttgaacag

SEQ ID NO: 732 - DNA, 25 bp, Artificial Sequence
  source: /note="Description of Artificial Sequence: Synthetic probe"
tggacatggtctcctctgattatca

SEQ ID NO: 733 - DNA, 25 bp, Artificial Sequence
  source: /note="Description of Artificial Sequence: Synthetic probe"
tgcctccttatttatcaacatcttt

SEQ ID NO: 734 - DNA, 25 bp, Artificial Sequence
  source: /note="Description of Artificial Sequence: Synthetic probe"
gccccatttgcacaggttttcagca

SEQ ID NO: 735 - DNA, 25 bp, Artificial Sequence
  source: /note="Description of Artificial Sequence: Synthetic probe"
gcaactcagaatgctctacttcttt

SEQ ID NO: 736 - DNA, 25 bp, Artificial Sequence
  source: /note="Description of Artificial Sequence: Synthetic probe"
ttgtgtggatacccagtcccagaac

SEQ ID NO: 737 - DNA, 25 bp, Artificial Sequence
  source: /note="Description of Artificial Sequence: Synthetic probe"
tgagttggacacactgtaaacccct

SEQ ID NO: 738 - DNA, 25 bp, Artificial Sequence
  source: /note="Description of Artificial Sequence: Synthetic probe"
gattggaatgcctggctctactctc

SEQ ID NO: 739 - DNA, 25 bp, Artificial Sequence
  source: /note="Description of Artificial Sequence: Synthetic probe"
gccacagacctgaaggatctctctt

SEQ ID NO: 740 - DNA, 25 bp, Artificial Sequence
  source: /note="Description of Artificial Sequence: Synthetic probe"
ggatctctcttctcatcaattgaat

SEQ ID NO: 741 - DNA, 25 bp, Artificial Sequence
  source: /note="Description of Artificial Sequence: Synthetic probe"
gagtttttagcacagacgctccaga

SEQ ID NO: 742 - DNA, 25 bp, Artificial Sequence
  source: /note="Description of Artificial Sequence: Synthetic probe"
tgggaggacgcaattcctttggcgc

SEQ ID NO: 743 - DNA, 25 bp, Artificial Sequence
  source: /note="Description of Artificial Sequence: Synthetic probe"
ggcccttattcaaggatcttgctgc

SEQ ID NO: 744 - DNA, 25 bp, Artificial Sequence
  source: /note="Description of Artificial Sequence: Synthetic probe"
ttgctgcctttgacaaatcccatga

SEQ ID NO: 745 - DNA, 25 bp, Artificial Sequence
  source: /note="Description of Artificial Sequence: Synthetic probe"
aaatcccatgatcaagctgtccgaa

SEQ ID NO: 746 - DNA, 25 bp, Artificial Sequence
  source: /note="Description of Artificial Sequence: Synthetic probe"
gtccgaacctaccaagagcacaaag

SEQ ID NO: 747 - DNA, 25 bp, Artificial Sequence
  source: /note="Description of Artificial Sequence: Synthetic probe"
caaagcaagcatgcatcccgtgact

SEQ ID NO: 748 - DNA, 25 bp, Artificial Sequence
  source: /note="Description of Artificial Sequence: Synthetic probe"
catcccgtgactgcaatgctggtgg

SEQ ID NO: 749 - DNA, 25 bp, Artificial Sequence
  source: /note="Description of Artificial Sequence: Synthetic probe"
cagaaagcgctgctgtacctgtgtg

SEQ ID NO: 750 - DNA, 25 bp, Artificial Sequence
  source: /note="Description of Artificial Sequence: Synthetic probe"
tggtggagctgactgaagcccgaca

SEQ ID NO: 751 - DNA, 25 bp, Artificial Sequence
  source: /note="Description of Artificial Sequence: Synthetic probe"
gacacagcctgagcgtccagaaatg

SEQ ID NO: 752 - DNA, 25 bp, Artificial Sequence
  source: /note="Description of Artificial Sequence: Synthetic probe"
ctcaccatgcttccagctaacaggt

SEQ ID NO: 753 - DNA, 25 bp, Artificial Sequence
  source: /note="Description of Artificial Sequence: Synthetic probe"
tagtcccagctagtccggagctgag

SEQ ID NO: 754 - DNA, 25 bp, Artificial Sequence
  source: /note="Description of Artificial Sequence: Synthetic probe"
tgccccacctccagaaagtatttga

SEQ ID NO: 755 - DNA, 25 bp, Artificial Sequence
  source: /note="Description of Artificial Sequence: Synthetic probe"
ctgaacctggtccagcgcattcaga

SEQ ID NO: 756 - DNA, 25 bp, Artificial Sequence
  source: /note="Description of Artificial Sequence: Synthetic probe"
aagcccttgtattttgctgatcagc

SEQ ID NO: 757 - DNA, 25 bp, Artificial Sequence
  source: /note="Description of Artificial Sequence: Synthetic probe"
ctgatcagctgtacgactccatgaa

SEQ ID NO: 758 - DNA, 25 bp, Artificial Sequence
  source: /note="Description of Artificial Sequence: Synthetic probe"
ctgatcagaatcatggtctcccgca

SEQ ID NO: 759 - DNA, 25 bp, Artificial Sequence
  source: /note="Description of Artificial Sequence: Synthetic probe"
ggcaagtccctgtactactatatcc

SEQ ID NO: 760 - DNA, 25 bp, Artificial Sequence
  source: /note="Description of Artificial Sequence: Synthetic probe"
cgcccagcgtctagactgtagcatc

SEQ ID NO: 761 - DNA, 25 bp, Artificial Sequence
  source: /note="Description of Artificial Sequence: Synthetic probe"
gaaccagcatcgggtgttcactgtc

SEQ ID NO: 762 - DNA, 25 bp, Artificial Sequence
  source: /note="Description of Artificial Sequence: Synthetic probe"
gtgttcactgtcgagtctcgagtga

SEQ ID NO: 763 - DNA, 25 bp, Artificial Sequence
  source: /note="Description of Artificial Sequence: Synthetic probe"
tacgctgccacgctgggggcagctg

SEQ ID NO: 764 - DNA, 25 bp, Artificial Sequence
  source: /note="Description of Artificial Sequence: Synthetic probe"
ccagggcaagttcccagatcctatg

SEQ ID NO: 765 - DNA, 25 bp, Artificial Sequence
  source: /note="Description of Artificial Sequence: Synthetic probe"
tcccagatcctatgtctgtctgtcc

SEQ ID NO: 766 - DNA, 25 bp, Artificial Sequence
  source: /note="Description of Artificial Sequence: Synthetic probe"
agaaaaagcggtacgatgccttcct

SEQ ID NO: 767 - DNA, 25 bp, Artificial Sequence
  source: /note="Description of Artificial Sequence: Synthetic probe"
ggccccacgtcaaaggtcaagtgag

SEQ ID NO: 768 - DNA, 25 bp, Artificial Sequence
  source: /note="Description of Artificial Sequence: Synthetic probe"
tctgtcagacaggctgccctagagc

SEQ ID NO: 769 - DNA, 25 bp, Artificial Sequence
  source: /note="Description of Artificial Sequence: Synthetic probe"
tccggggggactgggagcagttcca

SEQ ID NO: 770 - DNA, 25 bp, Artificial Sequence
  source: /note="Description of Artificial Sequence: Synthetic probe"
actgggagcagttccaagaccaccc

SEQ ID NO: 771 - DNA, 25 bp, Artificial Sequence
  source: /note="Description of Artificial Sequence: Synthetic probe"
gcactccgtaactcaacatggcatg

SEQ ID NO: 772 - DNA, 25 bp, Artificial Sequence
  source: /note="Description of Artificial Sequence: Synthetic probe"
gcctttctctccgtaaactatttag

SEQ ID NO: 773 - DNA, 25 bp, Artificial Sequence
  source: /note="Description of Artificial Sequence: Synthetic probe"
ttttcagtatctctgtacctgttaa

SEQ ID NO: 774 - DNA, 25 bp, Artificial Sequence
  source: /note="Description of Artificial Sequence: Synthetic probe"
gagaatattggctgctgattgttgc

SEQ ID NO: 775 - DNA, 25 bp, Artificial Sequence
  source: /note="Description of Artificial Sequence: Synthetic probe"
ttgttgccatcacgttcctacaaaa

SEQ ID NO: 776 - DNA, 25 bp, Artificial Sequence
  source: /note="Description of Artificial Sequence: Synthetic probe"
tgggatgttctggcagctgtgtcat

SEQ ID NO: 777 - DNA, 25 bp, Artificial Sequence
  source: /note="Description of Artificial Sequence: Synthetic probe"
atgctgctgggttcattcattcatt

SEQ ID NO: 778 - DNA, 25 bp, Artificial Sequence
  source: /note="Description of Artificial Sequence: Synthetic probe"
gtttagggatctttctgatggtctt

SEQ ID NO: 779 - DNA, 25 bp, Artificial Sequence
  source: /note="Description of Artificial Sequence: Synthetic probe"
cttagttctaagtcattgttcccat

SEQ ID NO: 780 - DNA, 25 bp, Artificial Sequence
  source: /note="Description of Artificial Sequence: Synthetic probe"
aatagtgaacttgattcccctgctt

SEQ ID NO: 781 - DNA, 25 bp, Artificial Sequence
  source: /note="Description of Artificial Sequence: Synthetic probe"
ctgcttccactaaatccagttgtga

SEQ ID NO: 782 - DNA, 25 bp, Artificial Sequence
  source: /note="Description of Artificial Sequence: Synthetic probe"
ggactgcacagttcatggaggctgc

SEQ ID NO: 783 - DNA, 25 bp, Artificial Sequence
  source: /note="Description of Artificial Sequence: Synthetic probe"
atgaggccttggatgctctggatgc

SEQ ID NO: 784 - DNA, 25 bp, Artificial Sequence
  source: /note="Description of Artificial Sequence: Synthetic probe"
tggagatccctggtccagaattcca

SEQ ID NO: 785 - DNA, 25 bp, Artificial Sequence
  source: /note="Description of Artificial Sequence: Synthetic probe"
ttccatttaccttctgggccagata

SEQ ID NO: 786 - DNA, 25 bp, Artificial Sequence
  source: /note="Description of Artificial Sequence: Synthetic probe"
ggtcccattattggtcctggtggta

SEQ ID NO: 787 - DNA, 25 bp, Artificial Sequence
  source: /note="Description of Artificial Sequence: Synthetic probe"
ccaacttcgctgccaactttggtgc

SEQ ID NO: 788 - DNA, 25 bp, Artificial Sequence
  source: /note="Description of Artificial Sequence: Synthetic probe"
gtgccattggtttcttctgggttga

SEQ ID NO: 789 - DNA, 25 bp, Artificial Sequence
  source: /note="Description of Artificial Sequence: Synthetic probe"
tcccctgtgtgagctgaagcctcag

SEQ ID NO: 790 - DNA, 25 bp, Artificial Sequence
  source: /note="Description of Artificial Sequence: Synthetic probe"
ctatctagagagccacatcctgttg

SEQ ID NO: 791 - DNA, 25 bp, Artificial Sequence
  source: /note="Description of Artificial Sequence: Synthetic probe"
atttatttgctgttccttgtctact

SEQ ID NO: 792 - DNA, 25 bp, Artificial Sequence
  source: /note="Description of Artificial Sequence: Synthetic probe"
tttttccccttgtgtgctgtcaagt

SEQ ID NO: 793 - DNA, 25 bp, Artificial Sequence
  source: /note="Description of Artificial Sequence: Synthetic probe"
gaggaccttgatcttggcgaaagcc

SEQ ID NO: 794 - DNA, 25 bp, Artificial Sequence
  source: /note="Description of Artificial Sequence: Synthetic probe"
gccatcggtgtggcagctttagccc

SEQ ID NO: 795 - DNA, 25 bp, Artificial Sequence
  source: /note="Description of Artificial Sequence: Synthetic probe"
ttgagactctgaaccttagcactaa

SEQ ID NO: 796 - DNA, 25 bp, Artificial Sequence
  source: /note="Description of Artificial Sequence: Synthetic probe"
aaagttccccggactcatgaattct

SEQ ID NO: 797 - DNA, 25 bp, Artificial Sequence
  source: /note="Description of Artificial Sequence: Synthetic probe"
cccttggcattcgtgtgcacagcca

SEQ ID NO: 798 - DNA, 25 bp, Artificial Sequence
  source: /note="Description of Artificial Sequence: Synthetic probe"
gcacagccaaggacttcagtagacc

SEQ ID NO: 799 - DNA, 25 bp, Artificial Sequence
  source: /note="Description of Artificial Sequence: Synthetic probe"
tcagtagaccatctgggcagctttc

SEQ ID NO: 800 - DNA, 25 bp, Artificial Sequence
  source: /note="Description of Artificial Sequence: Synthetic probe"
aaccatcagataaatgaccctcccc

SEQ ID NO: 801 - DNA, 25 bp, Artificial Sequence
  source: /note="Description of Artificial Sequence: Synthetic probe"
gcaccatgtcagtgtcgtacaatct

SEQ ID NO: 802 - DNA, 25 bp, Artificial Sequence
  source: /note="Description of Artificial Sequence: Synthetic probe"
gtgtcgtacaatctaccaaccaacc

SEQ ID NO: 803 - DNA, 25 bp, Artificial Sequence
  source: /note="Description of Artificial Sequence: Synthetic probe"
agagcttatatggcagcttcctttt

SEQ ID NO: 804 - DNA, 25 bp, Artificial Sequence
  source: /note="Description of Artificial Sequence: Synthetic probe"
ggagaccgatgcttgctcaggatgt

SEQ ID NO: 805 - DNA, 25 bp, Artificial Sequence
  source: /note="Description of Artificial Sequence: Synthetic probe"
ccttgtttttgctagccatattttt

SEQ ID NO: 806 - DNA, 25 bp, Artificial Sequence
  source: /note="Description of Artificial Sequence: Synthetic probe"
gaacctgtgaaatgctttaccttgt

SEQ ID NO: 807 - DNA, 25 bp, Artificial Sequence
  source: /note="Description of Artificial Sequence: Synthetic probe"
ggcaaagttgcagtttgttcttgtt

SEQ ID NO: 808 - DNA, 25 bp, Artificial Sequence
  source: /note="Description of Artificial Sequence: Synthetic probe"
gtactgtgttcttcacagacccttt

SEQ ID NO: 809 - DNA, 25 bp, Artificial Sequence
  source: /note="Description of Artificial Sequence: Synthetic probe"
cttcacagaccctttgtagcgtggt

SEQ ID NO: 810 - DNA, 25 bp, Artificial Sequence
  source: /note="Description of Artificial Sequence: Synthetic probe"
gtagcgtggtcaggtctgctgtaac

SEQ ID NO: 811 - DNA, 25 bp, Artificial Sequence
  source: /note="Description of Artificial Sequence: Synthetic probe"
gttccatttctctcattcacaagat

SEQ ID NO: 812 - DNA, 25 bp, Artificial Sequence
  source: /note="Description of Artificial Sequence: Synthetic probe"
gaaggttctgattttcaactgatca

SEQ ID NO: 813 - DNA, 25 bp, Artificial Sequence
  source: /note="Description of Artificial Sequence: Synthetic probe"
ttcttcactactgagtttcttcttt

SEQ ID NO: 814 - DNA, 25 bp, Artificial Sequence
  source: /note="Description of Artificial Sequence: Synthetic probe"
ttcttctttggaaaccatcactatt

SEQ ID NO: 815 - DNA, 25 bp, Artificial Sequence
  source: /note="Description of Artificial Sequence: Synthetic probe"
actgtactgggccatgttgtgcctc

SEQ ID NO: 816 - DNA, 25 bp, Artificial Sequence
  source: /note="Description of Artificial Sequence: Synthetic probe"
aaaggagcctaggccaggtgcaacc

SEQ ID NO: 817 - DNA, 25 bp, Artificial Sequence
  source: /note="Description of Artificial Sequence: Synthetic probe"
tgccgcaccattgaactgtaccatg

SEQ ID NO: 818 - DNA, 25 bp, Artificial Sequence
  source: /note="Description of Artificial Sequence: Synthetic probe"
gactgaccttgatgagctgtgcaca

SEQ ID NO: 819 - DNA, 25 bp, Artificial Sequence
  source: /note="Description of Artificial Sequence: Synthetic probe"
tgattcacttcacgctttcagcgaa

SEQ ID NO: 820 - DNA, 25 bp, Artificial Sequence
  source: /note="Description of Artificial Sequence: Synthetic probe"
atcatctttgtgaaggcctcgcagg

SEQ ID NO: 821 - DNA, 25 bp, Artificial Sequence
  source: /note="Description of Artificial Sequence: Synthetic probe"
ggaagacgcaacacatgggacctat

SEQ ID NO: 822 - DNA, 25 bp, Artificial Sequence
  source: /note="Description of Artificial Sequence: Synthetic probe"
aagcgcagatgctagcacatgccct

SEQ ID NO: 823 - DNA, 25 bp, Artificial Sequence
  source: /note="Description of Artificial Sequence: Synthetic probe"
aatgtctgtatcactctgtgtctga

SEQ ID NO: 824 - DNA, 25 bp, Artificial Sequence
  source: /note="Description of Artificial Sequence: Synthetic probe"
ggcttcactcctgctgtaaatttgg

SEQ ID NO: 825 - DNA, 25 bp, Artificial Sequence
  source: /note="Description of Artificial Sequence: Synthetic probe"
aaatttggcttctgttgtcaccttc

SEQ ID NO: 826 - DNA, 25 bp, Artificial Sequence
  source: /note="Description of Artificial Sequence: Synthetic probe"
aatccattcatcctgattgggcatg

SEQ ID NO: 827 - DNA, 25 bp, Artificial Sequence
  source: /note="Description of Artificial Sequence: Synthetic probe"
gacaccttcgcttgttatcttgtca

SEQ ID NO: 828 - DNA, 25 bp, Artificial Sequence
  source: /note="Description of Artificial Sequence: Synthetic probe"
atcatttcacccttgccagtaaaaa

SEQ ID NO: 829 - DNA, 25 bp, Artificial Sequence
  source: /note="Description of Artificial Sequence: Synthetic probe"
ccattctcagcagactccagtattg

SEQ ID NO: 830 - DNA, 25 bp, Artificial Sequence
  source: /note="Description of Artificial Sequence: Synthetic probe"
ccagtattggcacagtcactcactg

SEQ ID NO: 831 - DNA, 25 bp, Artificial Sequence
  source: /note="Description of Artificial Sequence: Synthetic probe"
actgccattctcacactataacaag

SEQ ID NO: 832 - DNA, 25 bp, Artificial Sequence
  source: /note="Description of Artificial Sequence: Synthetic probe"
gaagtgcataagtctcctgggaaaa

SEQ ID NO: 833 - DNA, 25 bp, Artificial Sequence
  source: /note="Description of Artificial Sequence: Synthetic probe"
ccttctcgtgccatgactggtgatt

SEQ ID NO: 834 - DNA, 25 bp, Artificial Sequence
  source: /note="Description of Artificial Sequence: Synthetic probe"
tgatttcatgactcataagcccctc

SEQ ID NO: 835 - DNA, 25 bp, Artificial Sequence
  source: /note="Description of Artificial Sequence: Synthetic probe"
cccctccgtaggcatcattcaagat

SEQ ID NO: 836 - DNA, 25 bp, Artificial Sequence
  source: /note="Description of Artificial Sequence: Synthetic probe"
tggcccatgcatgctgtttgcagca

SEQ ID NO: 837 - DNA, 25 bp, Artificial Sequence
  source: /note="Description of Artificial Sequence: Synthetic probe"
ggcccgggtctgcggagagaggcct

SEQ ID NO: 838 - DNA, 25 bp, Artificial Sequence
  source: /note="Description of Artificial Sequence: Synthetic probe"
agctttcaattccgtagccagctgc

SEQ ID NO: 839 - DNA, 25 bp, Artificial Sequence
  source: /note="Description of Artificial Sequence: Synthetic probe"
aaccgcccaggatcagattgcatgt

SEQ ID NO: 840 - DNA, 25 bp, Artificial Sequence
  source: /note="Description of Artificial Sequence: Synthetic probe"
gattgcatgtgactctgaagctgac

SEQ ID NO: 841 - DNA, 25 bp, Artificial Sequence
  source: /note="Description of Artificial Sequence: Synthetic probe"
cttccatggccctcattaatgacac

SEQ ID NO: 842 - DNA, 25 bp, Artificial Sequence
  source: /note="Description of Artificial Sequence: Synthetic probe"
taatgacacttgtccccaaatccga

SEQ ID NO: 843 - DNA, 25 bp, Artificial Sequence
  source: /note="Description of Artificial Sequence: Synthetic probe"
gacagaaccttgttatttctcagac

SEQ ID NO: 844 - DNA, 25 bp, Artificial Sequence
  source: /note="Description of Artificial Sequence: Synthetic probe"
aaaggccaaacctctgttcagtgta

SEQ ID NO: 845 - DNA, 25 bp, Artificial Sequence
  source: /note="Description of Artificial Sequence: Synthetic probe"
tccagtgccaacaatcctagtgctt

SEQ ID NO: 846 - DNA, 25 bp, Artificial Sequence
  source: /note="Description of Artificial Sequence: Synthetic probe"
cctatgtgattttaactctgtcttc

SEQ ID NO: 847 - DNA, 25 bp, Artificial Sequence
  source: /note="Description of Artificial Sequence: Synthetic probe"
ttccaaaagtggcctctttgtctaa

SEQ ID NO: 848 - DNA, 25 bp, Artificial Sequence
  source: /note="Description of Artificial Sequence: Synthetic probe"
aggacggggtggaaatggacactcg

SEQ ID NO: 849 - DNA, 25 bp, Artificial Sequence
  source: /note="Description of Artificial Sequence: Synthetic probe"
cacagctttaccctcagacagaagg

SEQ ID NO: 850 - DNA, 25 bp, Artificial Sequence
  source: /note="Description of Artificial Sequence: Synthetic probe"
tttaccctcagacagaaggcaactg

SEQ ID NO: 851 - DNA, 25 bp, Artificial Sequence
  source: /note="Description of Artificial Sequence: Synthetic probe"
ccaacactggcgtcagggaaaacac

SEQ ID NO: 852 - DNA, 25 bp, Artificial Sequence
  source: /note="Description of Artificial Sequence: Synthetic probe"
ggaaaacacaggacattggcccaga

SEQ ID NO: 853 - DNA, 25 bp, Artificial Sequence
  source: /note="Description of Artificial Sequence: Synthetic probe"
attggcccagagacaggctgatttc

SEQ ID NO: 854 - DNA, 25 bp, Artificial Sequence
  source: /note="Description of Artificial Sequence: Synthetic probe"
gagacaggctgatttccaacgtcct

SEQ ID NO: 855 - DNA, 25 bp, Artificial Sequence
  source: /note="Description of Artificial Sequence: Synthetic probe"
gagcccaaggacgggggcctacaga

SEQ ID NO: 856 - DNA, 25 bp, Artificial Sequence
  source: /note="Description of Artificial Sequence: Synthetic probe"
gctgacgtccagggagaaaacttct

SEQ ID NO: 857 - DNA, 25 bp, Artificial Sequence
  source: /note="Description of Artificial Sequence: Synthetic probe"
aaacttctgtgctgccgtgaagaac

SEQ ID NO: 858 - DNA, 25 bp, Artificial Sequence
  source: /note="Description of Artificial Sequence: Synthetic probe"
tctgtgctgccgtgaagaacacaca

SEQ ID NO: 859 - DNA, 25 bp, Artificial Sequence
  source: /note="Description of Artificial Sequence: Synthetic probe"
gccaagcggaccagagctgtgcagc

SEQ ID NO: 860 - DNA, 25 bp, Artificial Sequence
  source: /note="Description of Artificial Sequence: Synthetic probe"
tgcgaatctgacttacgccattatt

SEQ ID NO: 861 - DNA, 25 bp, Artificial Sequence
  source: /note="Description of Artificial Sequence: Synthetic probe"
gacttacgccattattacgacagta

SEQ ID NO: 862 - DNA, 25 bp, Artificial Sequence
  source: /note="Description of Artificial Sequence: Synthetic probe"
acgacagtaccattgagttgtgcgt

SEQ ID NO: 863 - DNA, 25 bp, Artificial Sequence
  source: /note="Description of Artificial Sequence: Synthetic probe"
ttgagttgtgcgtgggggacccaga

SEQ ID NO: 864 - DNA, 25 bp, Artificial Sequence
  source: /note="Description of Artificial Sequence: Synthetic probe"
actctggaggccctcttgtgtgtaa

SEQ ID NO: 865 - DNA, 25 bp, Artificial Sequence
  source: /note="Description of Artificial Sequence: Synthetic probe"
gcattgtctcctatggacgaaacaa

SEQ ID NO: 866 - DNA, 25 bp, Artificial Sequence
  source: /note="Description of Artificial Sequence: Synthetic probe"
aagtctcaagctttgtacactggat

SEQ ID NO: 867 - DNA, 25 bp, Artificial Sequence
  source: /note="Description of Artificial Sequence: Synthetic probe"
tacaggaagcaaactaagcccccgc

SEQ ID NO: 868 - DNA, 25 bp, Artificial Sequence
  source: /note="Description of Artificial Sequence: Synthetic probe"
ctaagcccccgctgtaatgaaacac

SEQ ID NO: 869 - DNA, 25 bp, Artificial Sequence
  source: /note="Description of Artificial Sequence: Synthetic probe"
taatgaaacaccttctctggagcca

SEQ ID NO: 870 - DNA, 25 bp, Artificial Sequence
  source: /note="Description of Artificial Sequence: Synthetic probe"
ctgatcagaatcatggtctcccgca

SEQ ID NO: 871 - DNA, 25 bp, Artificial Sequence
  source: /note="Description of Artificial Sequence: Synthetic probe"
cagaaagcgctgctgtacctgtgtg

SEQ ID NO: 872 - DNA, 25 bp, Artificial Sequence
  source: /note="Description of Artificial Sequence: Synthetic probe"
ctcaccatgcttccagctaacaggt

SEQ ID NO: 873 - DNA, 25 bp, Artificial Sequence
  source: /note="Description of Artificial Sequence: Synthetic probe"
accagcttgcgaataacagtccccg

SEQ ID NO: 874 - DNA, 25 bp, Artificial Sequence
  source: /note="Description of Artificial Sequence: Synthetic probe"
cgtggccatccctgtgagggtgacg

SEQ ID NO: 875 - DNA, 25 bp, Artificial Sequence
  source: /note="Description of Artificial Sequence: Synthetic probe"
gagggtgacgttagcattaccccca

SEQ ID NO: 876 - DNA, 25 bp, Artificial Sequence
  source: /note="Description of Artificial Sequence: Synthetic probe"
agttgcctaagcattgcctggcctt

SEQ ID NO: 877 - DNA, 25 bp, Artificial Sequence
  source: /note="Description of Artificial Sequence: Synthetic probe"
tgcctcctgtgtactgtgtcataaa

SEQ ID NO: 878 - DNA, 25 bp, Artificial Sequence
  source: /note="Description of Artificial Sequence: Synthetic probe"
gaaaatgctttcctgaacctggttc

SEQ ID NO: 879 - DNA, 25 bp, Artificial Sequence
  source: /note="Description of Artificial Sequence: Synthetic probe"
caagcccctgtattttgctgatcgg

SEQ ID NO: 880 - DNA, 25 bp, Artificial Sequence
  source: /note="Description of Artificial Sequence: Synthetic probe"
gctgatcggctgtatgactccatga

SEQ ID NO: 881 - DNA, 25 bp, Artificial Sequence
  source: /note="Description of Artificial Sequence: Synthetic probe"
tctgcaccttcatccttaatatgtc

SEQ ID NO: 882 - DNA, 25 bp, Artificial Sequence
  source: /note="Description of Artificial Sequence: Synthetic probe"
catccttaatatgtcacagtttgtg

SEQ ID NO: 883 - DNA, 25 bp, Artificial Sequence
  source: /note="Description of Artificial Sequence: Synthetic probe"
acagtttgtgtgatccagcgtcatt

SEQ ID NO: 884 - DNA, 25 bp, Artificial Sequence
  source: /note="Description of Artificial Sequence: Synthetic probe"
ttgtgtgatccagcgtcatttccac

SEQ ID NO: 885 - DNA, 25 bp, Artificial Sequence
  source: /note="Description of Artificial Sequence: Synthetic probe"
gtcatttccacctgatggggcaact

SEQ ID NO: 886 - DNA, 25 bp, Artificial Sequence
  source: /note="Description of Artificial Sequence: Synthetic probe"
ggggcaactgtgagcattaaacctg

SEQ ID NO: 887 - DNA, 25 bp, Artificial Sequence
  source: /note="Description of Artificial Sequence: Synthetic probe"
acctgaaccagaagatcgagagcct

SEQ ID NO: 888 - DNA, 25 bp, Artificial Sequence
  source: /note="Description of Artificial Sequence: Synthetic probe"
gatcgagagcctaactttgcaacca

SEQ ID NO: 889 - DNA, 25 bp, Artificial Sequence
  source: /note="Description of Artificial Sequence: Synthetic probe"
gagcctaactttgcaaccattggtc

SEQ ID NO: 890 - DNA, 25 bp, Artificial Sequence
  source: /note="Description of Artificial Sequence: Synthetic probe"
caaccattggtctgcaggacatcac

SEQ ID NO: 891 - DNA, 25 bp, Artificial Sequence
  source: /note="Description of Artificial Sequence: Synthetic probe"
tggtctgcaggacatcactttagat

SEQ ID NO: 892 - DNA, 25 bp, Artificial Sequence
  source: /note="Description of Artificial Sequence: Synthetic probe"
gaaagactctgactgctgttcttgc

SEQ ID NO: 893 - DNA, 25 bp, Artificial Sequence
  source: /note="Description of Artificial Sequence: Synthetic probe"
gtaccggtgcaactgttacttcatt

SEQ ID NO: 894 - DNA, 25 bp, Artificial Sequence
  source: /note="Description of Artificial Sequence: Synthetic probe"
acgaaagtcggcatctctgtgcttc

SEQ ID NO: 895 - DNA, 25 bp, Artificial Sequence
  source: /note="Description of Artificial Sequence: Synthetic probe"
ctgtgcttctcagaaatccagcctg

SEQ ID NO: 896 - DNA, 25 bp, Artificial Sequence
  source: /note="Description of Artificial Sequence: Synthetic probe"
cagcctgcttcagcttcaaaacaca

SEQ ID NO: 897 - DNA, 25 bp, Artificial Sequence
  source: /note="Description of Artificial Sequence: Synthetic probe"
ttttactggattggactctcttaca

SEQ ID NO: 898 - DNA, 25 bp, Artificial Sequence
  source: /note="Description of Artificial Sequence: Synthetic probe"
cttacagtgaggagcacaccgcctg

SEQ ID NO: 899 - DNA, 25 bp, Artificial Sequence
  source: /note="Description of Artificial Sequence: Synthetic probe"
gcacaccgcctggttgtgggagaat

SEQ ID NO: 900 - DNA, 25 bp, Artificial Sequence
  source: /note="Description of Artificial Sequence: Synthetic probe"
gtgggagaatggctctgcactctcc

SEQ ID NO: 901 - DNA, 25 bp, Artificial Sequence
  source: /note="Description of Artificial Sequence: Synthetic probe"
tcccagtatctatttccatcatttg

SEQ ID NO: 902 - DNA, 25 bp, Artificial Sequence
  source: /note="Description of Artificial Sequence: Synthetic probe"
actaattgtctacttctggagtcta

SEQ ID NO: 903 - DNA, 25 bp, Artificial Sequence
  source: /note="Description of Artificial Sequence: Synthetic probe"
gaagtcagtccatcagatttgctct

SEQ ID NO: 904 - DNA, 25 bp, Artificial Sequence
  source: /note="Description of Artificial Sequence: Synthetic probe"
gctctgggccagtggtactgagtct

SEQ ID NO: 905 - DNA, 25 bp, Artificial Sequence
  source: /note="Description of Artificial Sequence: Synthetic probe"
aacagtctggatgctggtgccacta

SEQ ID NO: 906 - DNA, 25 bp, Artificial Sequence
  source: /note="Description of Artificial Sequence: Synthetic probe"
taatgatgtcaccatttctacctgc

SEQ ID NO: 907 - DNA, 25 bp, Artificial Sequence
  source: /note="Description of Artificial Sequence: Synthetic probe"
gccacgtctcggcgaaggttgggac

SEQ ID NO: 908 - DNA, 25 bp, Artificial Sequence
  source: /note="Description of Artificial Sequence: Synthetic probe"
gttgggactcgactggtgtttgatc

SEQ ID NO: 909 - DNA, 25 bp, Artificial Sequence
  source: /note="Description of Artificial Sequence: Synthetic probe"
gagggaccacagtcagcgtgaagca

SEQ ID NO: 910 - DNA, 25 bp, Artificial Sequence
  source: /note="Description of Artificial Sequence: Synthetic probe"
ctacgctacctgtgcgccataagga

SEQ ID NO: 911 - DNA, 25 bp, Artificial Sequence
  source: /note="Description of Artificial Sequence: Synthetic probe"
agaagaaacatgctgcttccccttc

SEQ ID NO: 912 - DNA, 25 bp, Artificial Sequence
  source: /note="Description of Artificial Sequence: Synthetic probe"
ctggaccctatcgtacagaacctgc

SEQ ID NO: 913 - DNA, 25 bp, Artificial Sequence
  source: /note="Description of Artificial Sequence: Synthetic probe"
gaacctgctaaggccatcaaaccta

SEQ ID NO: 914 - DNA, 25 bp, Artificial Sequence
  source: /note="Description of Artificial Sequence: Synthetic probe"
aagctatgtgtatcttctgtgtaaa

SEQ ID NO: 915 - DNA, 25 bp, Artificial Sequence
  source: /note="Description of Artificial Sequence: Synthetic probe"
aatggtgtggctagcatttcccttt

SEQ ID NO: 916 - DNA, 25 bp, Artificial Sequence
  source: /note="Description of Artificial Sequence: Synthetic probe"
taagtttgcttttgaccatcacctc

SEQ ID NO: 917 - DNA, 25 bp, Artificial Sequence
  source: /note="Description of Artificial Sequence: Synthetic probe"
tcacctcccagtagcaatttgcttt

SEQ ID NO: 918 - DNA, 25 bp, Artificial Sequence
  source: /note="Description of Artificial Sequence: Synthetic probe"
taatccatttagcaatccaggcctc

SEQ ID NO: 919 - DNA, 25 bp, Artificial Sequence
  source: /note="Description of Artificial Sequence: Synthetic probe"
gcaatccaggcctctgttgaaaaga

SEQ ID NO: 920 - DNA, 25 bp, Artificial Sequence
  source: /note="Description of Artificial Sequence: Synthetic probe"
gaagggaacacatttccttctgaac

SEQ ID NO: 921 - DNA, 25 bp, Artificial Sequence
  source: /note="Description of Artificial Sequence: Synthetic probe"
cttccctaagtcactttccttatgt

SEQ ID NO: 922 - DNA, 25 bp, Artificial Sequence
  source: /note="Description of Artificial Sequence: Synthetic probe"
agtcactttccttatgtatcatcta

SEQ ID NO: 923 - DNA, 25 bp, Artificial Sequence
  source: /note="Description of Artificial Sequence: Synthetic probe"
acttccttggaatatagctgcatta

SEQ ID NO: 924 - DNA, 25 bp, Artificial Sequence
  source: /note="Description of Artificial Sequence: Synthetic probe"
gaagcctgttgggccagaagacaga

SEQ ID NO: 925 - DNA, 25 bp, Artificial Sequence
  source: /note="Description of Artificial Sequence: Synthetic probe"
tgggtgaggagacctagcatgccct

SEQ ID NO: 926 - DNA, 25 bp, Artificial Sequence
  source: /note="Description of Artificial Sequence: Synthetic probe"
agcatgccctattggcagtgctcag

SEQ ID NO: 927 - DNA, 25 bp, Artificial Sequence
  source: /note="Description of Artificial Sequence: Synthetic probe"
tccctgctctgaatcgaagtcctag

SEQ ID NO: 928 - DNA, 25 bp, Artificial Sequence
  source: /note="Description of Artificial Sequence: Synthetic probe"
ttagtcatgacatctcgctgagcca

SEQ ID NO: 929 - DNA, 25 bp, Artificial Sequence
  source: /note="Description of Artificial Sequence: Synthetic probe"
ggagtagaggtctccggctattcca

SEQ ID NO: 930 - DNA, 25 bp, Artificial Sequence
  source: /note="Description of Artificial Sequence: Synthetic probe"
gaatgccgacacttccagaatgtat

SEQ ID NO: 931 - DNA, 25 bp, Artificial Sequence
  source: /note="Description of Artificial Sequence: Synthetic probe"
accctgtctgtattttctcggaggt

SEQ ID NO: 932 - DNA, 25 bp, Artificial Sequence
  source: /note="Description of Artificial Sequence: Synthetic probe"
tctcggaggttgtttttctccttct

SEQ ID NO: 933 - DNA, 25 bp, Artificial Sequence
  source: /note="Description of Artificial Sequence: Synthetic probe"
gtatgtcgaatccagtgcactcaag

SEQ ID NO: 934 - DNA, 25 bp, Artificial Sequence
  source: /note="Description of Artificial Sequence: Synthetic probe"
gcctcaaggtttatgtcactcctct

SEQ ID NO: 935 - DNA, 25 bp, Artificial Sequence
  source: /note="Description of Artificial Sequence: Synthetic probe"
ctgctgggctgttcattgtcattgc

SEQ ID NO: 936 - DNA, 25 bp, Artificial Sequence
  source: /note="Description of Artificial Sequence: Synthetic probe"
ggatgagcggcgtctgtgtagggac

SEQ ID NO: 937 - DNA, 25 bp, Artificial Sequence
  source: /note="Description of Artificial Sequence: Synthetic probe"
tgcagaagggtggtgtgctcccagg

SEQ ID NO: 938 - DNA, 25 bp, Artificial Sequence
  source: /note="Description of Artificial Sequence: Synthetic probe"
ggactggcatgacaggtgtctcctc

SEQ ID NO: 939 - DNA, 25 bp, Artificial Sequence
  source: /note="Description of Artificial Sequence: Synthetic probe"
tccctgtgcagaccagtgggcaagg

SEQ ID NO: 940 - DNA, 25 bp, Artificial Sequence
  source: /note="Description of Artificial Sequence: Synthetic probe"
tgtgctcctagcagggttgctgtgc

SEQ ID NO: 941 - DNA, 25 bp, Artificial Sequence
  source: /note="Description of Artificial Sequence: Synthetic probe"
cacacggagaggccctagagagcct

SEQ ID NO: 942 - DNA, 25 bp, Artificial Sequence
  source: /note="Description of Artificial Sequence: Synthetic probe"
gagagcctcatggattgtaactaaa

SEQ ID NO: 943 - DNA, 25 bp, Artificial Sequence
  source: /note="Description of Artificial Sequence: Synthetic probe"
ccagtgttaaaggcatccctcacct

SEQ ID NO: 944 - DNA, 25 bp, Artificial Sequence
  source: /note="Description of Artificial Sequence: Synthetic probe"
ctcacctctgcattgaacttacgta

SEQ ID NO: 945 - DNA, 25 bp, Artificial Sequence
  source: /note="Description of Artificial Sequence: Synthetic probe"
gaacttacgtatccatgccaaggaa

SEQ ID NO: 946 - DNA, 25 bp, Artificial Sequence
  source: /note="Description of Artificial Sequence: Synthetic probe"
gagccagttcagttaggtgtcaatt

SEQ ID NO: 947 - DNA, 25 bp, Artificial Sequence
  source: /note="Description of Artificial Sequence: Synthetic probe"
tccaaggactgagactgacctcctc

SEQ ID NO: 948 - DNA, 25 bp, Artificial Sequence
  source: /note="Description of Artificial Sequence: Synthetic probe"
acactctcctaagaggttctctcca

SEQ ID NO: 949 - DNA, 25 bp, Artificial Sequence
  source: /note="Description of Artificial Sequence: Synthetic probe"
ggccgcccatcatggttaattctgt

SEQ ID NO: 950 - DNA, 25 bp, Artificial Sequence
  source: /note="Description of Artificial Sequence: Synthetic probe"
cacacgggtagattgctggcctgtt

SEQ ID NO: 951 - DNA, 25 bp, Artificial Sequence
  source: /note="Description of Artificial Sequence: Synthetic probe"
tagggacacagatgaccgacctggt

SEQ ID NO: 952 - DNA, 25 bp, Artificial Sequence
  source: /note="Description of Artificial Sequence: Synthetic probe"
cagtctggtatgtgaggcgtgcgtg

SEQ ID NO: 953 - DNA, 25 bp, Artificial Sequence
  source: /note="Description of Artificial Sequence: Synthetic probe"
aggcgtgcgtgaagcaagaactcct

SEQ ID NO: 954 - DNA, 25 bp, Artificial Sequence
  source: /note="Description of Artificial Sequence: Synthetic probe"
agggacagggagccatcattcctgc

SEQ ID NO: 955 - DNA, 25 bp, Artificial Sequence
  source: /note="Description of Artificial Sequence: Synthetic probe"
acttcctgcaggagtcagcgttcaa

SEQ ID NO: 956 - DNA, 25 bp, Artificial Sequence
  source: /note="Description of Artificial Sequence: Synthetic probe"
gtcagcgttcaatcttgaccttgaa

SEQ ID NO: 957 - DNA, 25 bp, Artificial Sequence
  source: /note="Description of Artificial Sequence: Synthetic probe"
gatgttctttttacgtaccaattct

SEQ ID NO: 958 - DNA, 25 bp, Artificial Sequence
  source: /note="Description of Artificial Sequence: Synthetic probe"
aaaccatttgtatctggcatcactt

SEQ ID NO: 959 - DNA, 25 bp, Artificial Sequence
  source: /note="Description of Artificial Sequence: Synthetic probe"
tctggcatcacttactaacacacga

SEQ ID NO: 960 - DNA, 25 bp, Artificial Sequence
  source: /note="Description of Artificial Sequence: Synthetic probe"
taacacacgacatgcggcttttctg

SEQ ID NO: 961 - DNA, 25 bp, Artificial Sequence
  source: /note="Description of Artificial Sequence: Synthetic probe"
acatgcggcttttctgcatcaactg

SEQ ID NO: 962 - DNA, 25 bp, Artificial Sequence
  source: /note="Description of Artificial Sequence: Synthetic probe"
tctaatggttacttgctcgtgcgtt

SEQ ID NO: 963 - DNA, 25 bp, Artificial Sequence
  source: /note="Description of Artificial Sequence: Synthetic probe"
taatttgcttcatttccttgctatt

SEQ ID NO: 964 - DNA, 25 bp, Artificial Sequence
  source: /note="Description of Artificial Sequence: Synthetic probe"
tgcatttctctgtcactgtaactat

SEQ ID NO: 965 - DNA, 25 bp, Artificial Sequence
  source: /note="Description of Artificial Sequence: Synthetic probe"
aattttcatcttactgcacaatcaa

SEQ ID NO: 966 - DNA, 25 bp, Artificial Sequence
  source: /note="Description of Artificial Sequence: Synthetic probe"
taggaatgaactccagaggctgggc

SEQ ID NO: 967 - DNA, 25 bp, Artificial Sequence
  source: /note="Description of Artificial Sequence: Synthetic probe"
gaggctgggcctgaacagggaggtg

SEQ ID NO: 968 - DNA, 25 bp, Artificial Sequence
  source: /note="Description of Artificial Sequence: Synthetic probe"
gtgctcagtcgtacgacctgtacct

SEQ ID NO: 969 - DNA, 25 bp, Artificial Sequence
  source: /note="Description of Artificial Sequence: Synthetic probe"
gtggaaaagcctctaaatgcatccc

SEQ ID NO: 970 - DNA, 25 bp, Artificial Sequence
  source: /note="Description of Artificial Sequence: Synthetic probe"
tgcttcctttgccttacaattgaag

SEQ ID NO: 971 - DNA, 25 bp, Artificial Sequence
  source: /note="Description of Artificial Sequence: Synthetic probe"
caattgaagcagcccgtggtaccat

SEQ ID NO: 972 - DNA, 25 bp, Artificial Sequence
  source: /note="Description of Artificial Sequence: Synthetic probe"
cagtatgcagagacttcctcacctt

SEQ ID NO: 973 - DNA, 25 bp, Artificial Sequence
  source: /note="Description of Artificial Sequence: Synthetic probe"
cacctttcatatctagggaccaccc

SEQ ID NO: 974 - DNA, 25 bp, Artificial Sequence
  source: /note="Description of Artificial Sequence: Synthetic probe"
accacccccgatgcattggtgaggg

SEQ ID NO: 975 - DNA, 25 bp, Artificial Sequence
  source: /note="Description of Artificial Sequence: Synthetic probe"
ggtgggcacttataaatgcctgcta

SEQ ID NO: 976 - DNA, 25 bp, Artificial Sequence
  source: /note="Description of Artificial Sequence: Synthetic probe"
gcctgctattgttaagccattccag

SEQ ID NO: 977 - DNA, 25 bp, Artificial Sequence
  source: /note="Description of Artificial Sequence: Synthetic probe"
cagcctcttcctctgaatagaccag

SEQ ID NO: 978 - DNA, 25 bp, Artificial Sequence
  source: /note="Description of Artificial Sequence: Synthetic probe"
tctgaatagaccagacgccctttca

SEQ ID NO: 979 - DNA, 25 bp, Artificial Sequence
  source: /note="Description of Artificial Sequence: Synthetic probe"
cgccctttcacttagttcagtgcca

SEQ ID NO: 980 - DNA, 25 bp, Artificial Sequence
  source: /note="Description of Artificial Sequence: Synthetic probe"
gtatctgcatgaaggctcctgtctg

SEQ ID NO: 981 - DNA, 25 bp, Artificial Sequence
  source: /note="Description of Artificial Sequence: Synthetic probe"
ggctcctgtctgactattccaggat

SEQ ID NO: 982 - DNA, 25 bp, Artificial Sequence
  source: /note="Description of Artificial Sequence: Synthetic probe"
tattactgccttctgaaacttcctc

SEQ ID NO: 983 - DNA, 25 bp, Artificial Sequence
  source: /note="Description of Artificial Sequence: Synthetic probe"
taaccatcatgtatgcccacgaggg

SEQ ID NO: 984 - DNA, 25 bp, Artificial Sequence
  source: /note="Description of Artificial Sequence: Synthetic probe"
caaggaataccacagacaccctacc

SEQ ID NO: 985 - DNA, 25 bp, Artificial Sequence
  source: /note="Description of Artificial Sequence: Synthetic probe"
ccctaccgatagaacagtggctcag

SEQ ID NO: 986 - DNA, 25 bp, Artificial Sequence
  source: /note="Description of Artificial Sequence: Synthetic probe"
tgctcctgcttacgaagtattccca

SEQ ID NO: 987 - DNA, 25 bp, Artificial Sequence
  source: /note="Description of Artificial Sequence: Synthetic probe"
ttcccaatcactggtcatctgaccc

SEQ ID NO: 988 - DNA, 25 bp, Artificial Sequence
  source: /note="Description of Artificial Sequence: Synthetic probe"
ggaaatctagtcatcttccctgtga

SEQ ID NO: 989 - DNA, 25 bp, Artificial Sequence
  source: /note="Description of Artificial Sequence: Synthetic probe"
tccctgtgattgccctgttaagtat

SEQ ID NO: 990 - DNA, 25 bp, Artificial Sequence
  source: /note="Description of Artificial Sequence: Synthetic probe"
aaccatagctatcatgtgtttccca

SEQ ID NO: 991 - DNA, 25 bp, Artificial Sequence
  source: /note="Description of Artificial Sequence: Synthetic probe"
tcagacacacacaggtcgccagtga

SEQ ID NO: 992 - DNA, 25 bp, Artificial Sequence
  source: /note="Description of Artificial Sequence: Synthetic probe"
tagtgtgtcctatttcatacctgta

SEQ ID NO: 993 - DNA, 25 bp, Artificial Sequence
  source: /note="Description of Artificial Sequence: Synthetic probe"
tgtacacacttcctcgttttgtaat

SEQ ID NO: 994 - DNA, 25 bp, Artificial Sequence
  source: /note="Description of Artificial Sequence: Synthetic probe"
tacttacacccaaacagatcctgaa

SEQ ID NO: 995 - DNA, 25 bp, Artificial Sequence
  source: /note="Description of Artificial Sequence: Synthetic probe"
ggatgtaaggtgcacgtttcctgat

SEQ ID NO: 996 - DNA, 25 bp, Artificial Sequence
  source: /note="Description of Artificial Sequence: Synthetic probe"
gacgcactgtattccagctggtgat

SEQ ID NO: 997 - DNA, 25 bp, Artificial Sequence
  source: /note="Description of Artificial Sequence: Synthetic probe"
ggtgatcaagtctgggaacagccgt

SEQ ID NO: 998 - DNA, 25 bp, Artificial Sequence
  source: /note="Description of Artificial Sequence: Synthetic probe"
gaacagccgtaacaggtcaaccttg

SEQ ID NO: 999 - DNA, 25 bp, Artificial Sequence
  source: /note="Description of Artificial Sequence: Synthetic probe"
caaccttgtggagccatcgcgagtt

SEQ ID NO: 1000 - DNA, 25 bp, Artificial Sequence
  source: /note="Description of Artificial Sequence: Synthetic probe"
gcatcaatcttaatgtctcttcata

SEQ ID NO: 1001 - DNA, 25 bp, Artificial Sequence
  source: /note="Description of Artificial Sequence: Synthetic probe"
aatacattaagcctcttgtctacat

SEQ ID NO: 1002 - DNA, 25 bp, Artificial Sequence
  source: /note="Description of Artificial Sequence: Synthetic probe"
agctggagagtagagggtcccgcct

SEQ ID NO: 1003 - DNA, 25 bp, Artificial Sequence
  source: /note="Description of Artificial Sequence: Synthetic probe"
tggtcctgtctcaagtgcacttagg

SEQ ID NO: 1004 - DNA, 25 bp, Artificial Sequence
  source: /note="Description of Artificial Sequence: Synthetic probe"
acacctgagacacacctgtctccat

SEQ ID NO: 1005 - DNA, 25 bp, Artificial Sequence
  source: /note="Description of Artificial Sequence: Synthetic probe"
ccaggttctgaagcacatgtccggc

SEQ ID NO: 1006 - DNA, 25 bp, Artificial Sequence
  source: /note="Description of Artificial Sequence: Synthetic probe"
ccggccgcgttggagaagagctgga

SEQ ID NO: 1007 - DNA, 25 bp, Artificial Sequence
  source: /note="Description of Artificial Sequence: Synthetic probe"
ggcatcatgctggatgccttcgccc

SEQ ID NO: 1008 - DNA, 25 bp, Artificial Sequence
  source: /note="Description of Artificial Sequence: Synthetic probe"
tgccttcgcccaagagatggaccac

SEQ ID NO: 1009 - DNA, 25 bp, Artificial Sequence
  source: /note="Description of Artificial Sequence: Synthetic probe"
tcccgcatggacggggtcctcagga

SEQ ID NO: 1010 - DNA, 25 bp, Artificial Sequence
  source: /note="Description of Artificial Sequence: Synthetic probe"
gtatcccacatgacgagtgaccgcc

SEQ ID NO: 1011 - DNA, 25 bp, Artificial Sequence
  source: /note="Description of Artificial Sequence: Synthetic probe"
tggtcccttaagcctggggagccac

SEQ ID NO: 1012 - DNA, 25 bp, Artificial Sequence
  source: /note="Description of Artificial Sequence: Synthetic probe"
ggagccaccaagcactttggagctg

SEQ ID NO: 1013 - DNA, 25 bp, Artificial Sequence
  source: /note="Description of Artificial Sequence: Synthetic probe"
ggatctaccaccatataagagttat

SEQ ID NO: 1014 - DNA, 25 bp, Artificial Sequence
  source: /note="Description of Artificial Sequence: Synthetic probe"
ggagctcttgcatttaaatacccca

SEQ ID NO: 1015 - DNA, 25 bp, Artificial Sequence
  source: /note="Description of Artificial Sequence: Synthetic probe"
tgcatttaaataccccagccaagaa

SEQ ID NO: 1016 - DNA, 25 bp, Artificial Sequence
  source: /note="Description of Artificial Sequence: Synthetic probe"
aagctgttcattctgtacagtgaat

SEQ ID NO: 1017 - DNA, 25 bp, Artificial Sequence
  source: /note="Description of Artificial Sequence: Synthetic probe"
tacagtgaattttccgaacctctca

SEQ ID NO: 1018 - DNA, 25 bp, Artificial Sequence
  source: /note="Description of Artificial Sequence: Synthetic probe"
gaacctctcaaagtatgttttccgt

SEQ ID NO: 1019 - DNA, 25 bp, Artificial Sequence
  source: /note="Description of Artificial Sequence: Synthetic probe"
atgttttccgttcttccacagaaat

SEQ ID NO: 1020 - DNA, 25 bp, Artificial Sequence
  source: /note="Description of Artificial Sequence: Synthetic probe"
gcaaaacagttcatccttttctact

SEQ ID NO: 1021 - DNA, 25 bp, Artificial Sequence
  source: /note="Description of Artificial Sequence: Synthetic probe"
attgttcccttgaaatgactgacca

SEQ ID NO: 1022 - DNA, 25 bp, Artificial Sequence
  source: /note="Description of Artificial Sequence: Synthetic probe"
tatgatagtggctctagttttatag

SEQ ID NO: 1023 - DNA, 25 bp, Artificial Sequence
  source: /note="Description of Artificial Sequence: Synthetic probe"
atctggatttgctttaccttgttaa

SEQ ID NO: 1024 - DNA, 25 bp, Artificial Sequence
  source: /note="Description of Artificial Sequence: Synthetic probe"
tgctgttcatcccacatcgtgtggg

SEQ ID NO: 1025 - DNA, 25 bp, Artificial Sequence
  source: /note="Description of Artificial Sequence: Synthetic probe"
cctgcagctacttggtgacttaaca

SEQ ID NO: 1026 - DNA, 25 bp, Artificial Sequence
  source: /note="Description of Artificial Sequence: Synthetic probe"
taacaactccaggagccctgtcagc

SEQ ID NO: 1027 - DNA, 25 bp, Artificial Sequence
  source: /note="Description of Artificial Sequence: Synthetic probe"
gtctctgcacctacttttgcagaat

SEQ ID NO: 1028 - DNA, 25 bp, Artificial Sequence
  source: /note="Description of Artificial Sequence: Synthetic probe"
tacaaaccacattacttctgtcact

SEQ ID NO: 1029 - DNA, 25 bp, Artificial Sequence
  source: /note="Description of Artificial Sequence: Synthetic probe"
ctgtcacttcagggcatcgggactg

SEQ ID NO: 1030 - DNA, 25 bp, Artificial Sequence
  source: /note="Description of Artificial Sequence: Synthetic probe"
gcgcccttgttatgtgctattttaa

SEQ ID NO: 1031 - DNA, 25 bp, Artificial Sequence
  source: /note="Description of Artificial Sequence: Synthetic probe"
gttacccatgtatgctgtgtttatc

SEQ ID NO: 1032 - DNA, 25 bp, Artificial Sequence
  source: /note="Description of Artificial Sequence: Synthetic probe"
gtttatcatgtgtatatcgtccaga

SEQ ID NO: 1033 - DNA, 25 bp, Artificial Sequence
  source: /note="Description of Artificial Sequence: Synthetic probe"
gatgcaactggcgaaccttggagag

SEQ ID NO: 1034 - DNA, 25 bp, Artificial Sequence
  source: /note="Description of Artificial Sequence: Synthetic probe"
gctgattgtcttgaccaaacccaca

SEQ ID NO: 1035 - DNA, 25 bp, Artificial Sequence
  source: /note="Description of Artificial Sequence: Synthetic probe"
ggtactatgttagccccataatttt

SEQ ID NO: 1036 - DNA, 25 bp, Artificial Sequence
  source: /note="Description of Artificial Sequence: Synthetic probe"
acacttccataatctggactcctct

SEQ ID NO: 1037 - DNA, 25 bp, Artificial Sequence
  source: /note="Description of Artificial Sequence: Synthetic probe"
gattttttacagctgcctgcagtac

SEQ ID NO: 1038 - DNA, 25 bp, Artificial Sequence
  source: /note="Description of Artificial Sequence: Synthetic probe"
cagtactttacctcctatcagaagt

SEQ ID NO: 1039 - DNA, 25 bp, Artificial Sequence
  source: /note="Description of Artificial Sequence: Synthetic probe"
agctcccaaggctctgagcaaatgt

SEQ ID NO: 1040 - DNA, 25 bp, Artificial Sequence
  source: /note="Description of Artificial Sequence: Synthetic probe"
gagcaaatgtggctcctgggggttc

SEQ ID NO: 1041 - DNA, 25 bp, Artificial Sequence
  source: /note="Description of Artificial Sequence: Synthetic probe"
ataaattgctccttgacattgtaga

SEQ ID NO: 1042 - DNA, 25 bp, Artificial Sequence
  source: /note="Description of Artificial Sequence: Synthetic probe"
tgactcgtatatgtctcaggtccct

SEQ ID NO: 1043 - DNA, 25 bp, Artificial Sequence
  source: /note="Description of Artificial Sequence: Synthetic probe"
ctcttggcaggtactcagcgaatga

SEQ ID NO: 1044 - DNA, 25 bp, Artificial Sequence
  source: /note="Description of Artificial Sequence: Synthetic probe"
tgttgggtgcaaagttccctacttc

SEQ ID NO: 1045 - DNA, 25 bp, Artificial Sequence
  source: /note="Description of Artificial Sequence: Synthetic probe"
ttcctgtgacttcagctctgtttta

SEQ ID NO: 1046 - DNA, 25 bp, Artificial Sequence
  source: /note="Description of Artificial Sequence: Synthetic probe"
tgaggactctactcggcaaagccag

SEQ ID NO: 1047 - DNA, 25 bp, Artificial Sequence
  source: /note="Description of Artificial Sequence: Synthetic probe"
cactgaggcctctgcaagcaacaga

SEQ ID NO: 1048 - DNA, 25 bp, Artificial Sequence
  source: /note="Description of Artificial Sequence: Synthetic probe"
catgaccgatggactttctgaagct

SEQ ID NO: 1049 - DNA, 25 bp, Artificial Sequence
  source: /note="Description of Artificial Sequence: Synthetic probe"
gaatcagggctgtggtaatcatctt

SEQ ID NO: 1050 - DNA, 25 bp, Artificial Sequence
  source: /note="Description of Artificial Sequence: Synthetic probe"
atctacaaccaaatgcctcttatcc

SEQ ID NO: 1051 - DNA, 25 bp, Artificial Sequence
  source: /note="Description of Artificial Sequence: Synthetic probe"
tctagttagggtcctgctgtctgtc

SEQ ID NO: 1052 - DNA, 25 bp, Artificial Sequence
  source: /note="Description of Artificial Sequence: Synthetic probe"
ctgtctgtcatgttgccttgtaacg

SEQ ID NO: 1053 - DNA, 25 bp, Artificial Sequence
  source: /note="Description of Artificial Sequence: Synthetic probe"
ctctaccccaccattagtgtatttt

SEQ ID NO: 1054 - DNA, 25 bp, Artificial Sequence
  source: /note="Description of Artificial Sequence: Synthetic probe"
ttaccttgcaatcacttctttcaca

SEQ ID NO: 1055 - DNA, 25 bp, Artificial Sequence
  source: /note="Description of Artificial Sequence: Synthetic probe"
acagcagttgtattgtgccgtggct

SEQ ID NO: 1056 - DNA, 25 bp, Artificial Sequence
  source: /note="Description of Artificial Sequence: Synthetic probe"
gtgccgtggctagaactgcatgaca

SEQ ID NO: 1057 - DNA, 25 bp, Artificial Sequence
  source: /note="Description of Artificial Sequence: Synthetic probe"
taacttggggatggtctcccctgcc

SEQ ID NO: 1058 - DNA, 25 bp, Artificial Sequence
  source: /note="Description of Artificial Sequence: Synthetic probe"
ctgccccagggcacataagagcaaa

SEQ ID NO: 1059 - DNA, 25 bp, Artificial Sequence
  source: /note="Description of Artificial Sequence: Synthetic probe"
ggatgactctgcaaaagtgaccccc

SEQ ID NO: 1060 - DNA, 25 bp, Artificial Sequence
  source: /note="Description of Artificial Sequence: Synthetic probe"
ctccccaacaggtctctcttgttgg

SEQ ID NO: 1061 - DNA, 25 bp, Artificial Sequence
  source: /note="Description of Artificial Sequence: Synthetic probe"
cctgcttcccatgggcattgcaagt

SEQ ID NO: 1062 - DNA, 25 bp, Artificial Sequence
  source: /note="Description of Artificial Sequence: Synthetic probe"
atgggcattgcaagtgccaccgtgc

SEQ ID NO: 1063 - DNA, 25 bp, Artificial Sequence
  source: /note="Description of Artificial Sequence: Synthetic probe"
ctccgcaataattcaccagaccaga

SEQ ID NO: 1064 - DNA, 25 bp, Artificial Sequence
  source: /note="Description of Artificial Sequence: Synthetic probe"
gtatactgtatcagcagctttgtgt

SEQ ID NO: 1065 - DNA, 25 bp, Artificial Sequence
  source: /note="Description of Artificial Sequence: Synthetic probe"
aaaatcttcgcagatctttgatatc

SEQ ID NO: 1066 - DNA, 25 bp, Artificial Sequence
  source: /note="Description of Artificial Sequence: Synthetic probe"
tactgaggtaacttccacgtagccc

SEQ ID NO: 1067 - DNA, 25 bp, Artificial Sequence
  source: /note="Description of Artificial Sequence: Synthetic probe"
aaggcctgtgacagaattcgctgtt

SEQ ID NO: 1068 - DNA, 25 bp, Artificial Sequence
  source: /note="Description of Artificial Sequence: Synthetic probe"
gaatgtgagagcctgggtgtctgag

SEQ ID NO: 1069 - DNA, 25 bp, Artificial Sequence
  source: /note="Description of Artificial Sequence: Synthetic probe"
gcctgggtgtctgagaccgggaggg

SEQ ID NO: 1070 - DNA, 25 bp, Artificial Sequence
  source: /note="Description of Artificial Sequence: Synthetic probe"
ctcttctggtcaccaggctgttcag

SEQ ID NO: 1071 - DNA, 25 bp, Artificial Sequence
  source: /note="Description of Artificial Sequence: Synthetic probe"
ggctgttcagtggactcagttcttc

SEQ ID NO: 1072 - DNA, 25 bp, Artificial Sequence
  source: /note="Description of Artificial Sequence: Synthetic probe"
ggactcagttcttcatcttgtaatg

SEQ ID NO: 1073 - DNA, 25 bp, Artificial Sequence
  source: /note="Description of Artificial Sequence: Synthetic probe"
cttgtaatgtcgatggctttgccac

SEQ ID NO: 1074 - DNA, 25 bp, Artificial Sequence
  source: /note="Description of Artificial Sequence: Synthetic probe"
catgccataccttgtcaagactgtc

SEQ ID NO: 1075 - DNA, 25 bp, Artificial Sequence
  source: /note="Description of Artificial Sequence: Synthetic probe"
gaagaaacaggtcagccctcagatc

SEQ ID NO: 1076 - DNA, 25 bp, Artificial Sequence
  source: /note="Description of Artificial Sequence: Synthetic probe"
gctctgccattagctaggacctaag

SEQ ID NO: 1077 - DNA, 25 bp, Artificial Sequence
  source: /note="Description of Artificial Sequence: Synthetic probe"
ttagctaggacctaagactctgccc

SEQ ID NO: 1078 - DNA, 25 bp, Artificial Sequence
  source: /note="Description of Artificial Sequence: Synthetic probe"
taggtttgtctcagcatgcaagagt

SEQ ID NO: 1079 - DNA, 25 bp, Artificial Sequence
  source: /note="Description of Artificial Sequence: Synthetic probe"
atttctggtttgaggctgtgggtcc

SEQ ID NO: 1080 - DNA, 25 bp, Artificial Sequence
  source: /note="Description of Artificial Sequence: Synthetic probe"
gacatcatatcaggctacatccacg

SEQ ID NO: 1081 - DNA, 25 bp, Artificial Sequence
  source: /note="Description of Artificial Sequence: Synthetic probe"
tcatatcaggctacatccacgtgac

SEQ ID NO: 1082 - DNA, 25 bp, Artificial Sequence
  source: /note="Description of Artificial Sequence: Synthetic probe"
acgcagaccttcagcattatggctg

SEQ ID NO: 1083 - DNA, 25 bp, Artificial Sequence
  source: /note="Description of Artificial Sequence: Synthetic probe"
cattatggctgttctgtgggccctg

SEQ ID NO: 1084 - DNA, 25 bp, Artificial Sequence
  source: /note="Description of Artificial Sequence: Synthetic probe"
tggccatggcggtgtacaccagcga

SEQ ID NO: 1085 - DNA, 25 bp, Artificial Sequence
  source: /note="Description of Artificial Sequence: Synthetic probe"
tacaccagcgagcggtgggaccagc

SEQ ID NO: 1086 - DNA, 25 bp, Artificial Sequence
  source: /note="Description of Artificial Sequence: Synthetic probe"
ctatcctcttgctctgtacaggtgc

SEQ ID NO: 1087 - DNA, 25 bp, Artificial Sequence
  source: /note="Description of Artificial Sequence: Synthetic probe"
cgtcctggctatgaaaccttgtgag

SEQ ID NO: 1088 - DNA, 25 bp, Artificial Sequence
  source: /note="Description of Artificial Sequence: Synthetic probe"
gtgagcagaaggcaagagcggcaag

SEQ ID NO: 1089 - DNA, 25 bp, Artificial Sequence
  source: /note="Description of Artificial Sequence: Synthetic probe"
gatgagttttgagcgttgtattcca

SEQ ID NO: 1090 - DNA, 25 bp, Artificial Sequence
  source: /note="Description of Artificial Sequence: Synthetic probe"
gaagaaccctgactttgtttctgca

SEQ ID NO: 1091 - DNA, 25 bp, Artificial Sequence
  source: /note="Description of Artificial Sequence: Synthetic probe"
aaggcacctgcatgtgtctgtgttc

SEQ ID NO: 1092 - DNA, 25 bp, Artificial Sequence
  source: /note="Description of Artificial Sequence: Synthetic probe"
caatcatctttcctgttccagagag

SEQ ID NO: 1093 - DNA, 25 bp, Artificial Sequence
  source: /note="Description of Artificial Sequence: Synthetic probe"
catctctgtctcaacttcatggtgc

SEQ ID NO: 1094 - DNA, 25 bp, Artificial Sequence
  source: /note="Description of Artificial Sequence: Synthetic probe"
tggtgcactgagctgtaacttcttc

SEQ ID NO: 1095 - DNA, 25 bp, Artificial Sequence
  source: /note="Description of Artificial Sequence: Synthetic probe"
gacagacctcaggagggctattggt

SEQ ID NO: 1096 - DNA, 25 bp, Artificial Sequence
  source: /note="Description of Artificial Sequence: Synthetic probe"
ggctattggtccaggacccacacct

SEQ ID NO: 1097 - DNA, 25 bp, Artificial Sequence
  source: /note="Description of Artificial Sequence: Synthetic probe"
ggtctgcagtcacacatttctggaa

SEQ ID NO: 1098 - DNA, 25 bp, Artificial Sequence
  source: /note="Description of Artificial Sequence: Synthetic probe"
ggaaacttctctggggtccaagact

SEQ ID NO: 1099 - DNA, 25 bp, Artificial Sequence
  source: /note="Description of Artificial Sequence: Synthetic probe"
agacagctgccttgtgtgggactga

SEQ ID NO: 1100 - DNA, 25 bp, Artificial Sequence
  source: /note="Description of Artificial Sequence: Synthetic probe"
tgcccttccctttgtgacttgaaga

SEQ ID NO: 1101 - DNA, 25 bp, Artificial Sequence
  source: /note="Description of Artificial Sequence: Synthetic probe"
gccgaactgtcaccgaacgtacagc

SEQ ID NO: 1102 - DNA, 25 bp, Artificial Sequence
  source: /note="Description of Artificial Sequence: Synthetic probe"
cgtacagctgtatccactgcagagc

SEQ ID NO: 1103 - DNA, 25 bp, Artificial Sequence
  source: /note="Description of Artificial Sequence: Synthetic probe"
acacctggccaatcatgacgagctc

SEQ ID NO: 1104 - DNA, 25 bp, Artificial Sequence
  source: /note="Description of Artificial Sequence: Synthetic probe"
tccaagtcctttcaggggagccagg

SEQ ID NO: 1105 - DNA, 25 bp, Artificial Sequence
  source: /note="Description of Artificial Sequence: Synthetic probe"
tgcatgcggttgccgacatctactg

SEQ ID NO: 1106 - DNA, 25 bp, Artificial Sequence
  source: /note="Description of Artificial Sequence: Synthetic probe"
gagtaatgtgcgaactttcccttct

SEQ ID NO: 1107 - DNA, 25 bp, Artificial Sequence
  source: /note="Description of Artificial Sequence: Synthetic probe"
taggagcatctggtgacagcctttc

SEQ ID NO: 1108 - DNA, 25 bp, Artificial Sequence
  source: /note="Description of Artificial Sequence: Synthetic probe"
gccctctgacctcaaaggctagctg

SEQ ID NO: 1109 - DNA, 25 bp, Artificial Sequence
  source: /note="Description of Artificial Sequence: Synthetic probe"
tagctgcgcatagctcttgacactc

SEQ ID NO: 1110 - DNA, 25 bp, Artificial Sequence
  source: /note="Description of Artificial Sequence: Synthetic probe"
tgtgggtaaggtgtccctcggatct

SEQ ID NO: 1111 - DNA, 25 bp, Artificial Sequence
  source: /note="Description of Artificial Sequence: Synthetic probe"
tgtcctcttcgtgtacacagttgtt

SEQ ID NO: 1112 - DNA, 25 bp, Artificial Sequence
  source: /note="Description of Artificial Sequence: Synthetic probe"
aagggccggaggtcatggccttcat

SEQ ID NO: 1113 - DNA, 25 bp, Artificial Sequence
  source: /note="Description of Artificial Sequence: Synthetic probe"
cccgaactgtacgcactcatgagtg

SEQ ID NO: 1114 - DNA, 25 bp, Artificial Sequence
  source: /note="Description of Artificial Sequence: Synthetic probe"
tcatgagtgactgctggatctacaa

SEQ ID NO: 1115 - DNA, 25 bp, Artificial Sequence
  source: /note="Description of Artificial Sequence: Synthetic probe"
catgcgagcctgttactacagcctg

SEQ ID NO: 1116 - DNA, 25 bp, Artificial Sequence
  source: /note="Description of Artificial Sequence: Synthetic probe"
cacagctgggctgtggtagggggtg

SEQ ID NO: 1117 - DNA, 25 bp, Artificial Sequence
  source: /note="Description of Artificial Sequence: Synthetic probe"
agcagggaggtccgggagggtgcgg

SEQ ID NO: 1118 - DNA, 25 bp, Artificial Sequence
  source: /note="Description of Artificial Sequence: Synthetic probe"
ggcattgcttacacggatgccttcc

SEQ ID NO: 1119 - DNA, 25 bp, Artificial Sequence
  source: /note="Description of Artificial Sequence: Synthetic probe"
tgggccctgacattggagcctgggc

SEQ ID NO: 1120 - DNA, 25 bp, Artificial Sequence
  source: /note="Description of Artificial Sequence: Synthetic probe"
tgacattggagcctgggcatcctca

SEQ ID NO: 1121 - DNA, 25 bp, Artificial Sequence
  source: /note="Description of Artificial Sequence: Synthetic probe"
ggtggtcaggcgtagatcaccagaa

SEQ ID NO: 1122 - DNA, 25 bp, Artificial Sequence
  source: /note="Description of Artificial Sequence: Synthetic probe"
atcaccagaataaacccagcttccc

SEQ ID NO: 1123 - DNA, 25 bp, Artificial Sequence
  source: /note="Description of Artificial Sequence: Synthetic probe"
ggagagaagggctatttccggctgc

SEQ ID NO: 1124 - DNA, 25 bp, Artificial Sequence
  source: /note="Description of Artificial Sequence: Synthetic probe"
cggctgcaccgagggagcaatacct

SEQ ID NO: 1125 - DNA, 25 bp, Artificial Sequence
  source: /note="Description of Artificial Sequence: Synthetic probe"
atacctgtggcatcaccaagttccc

SEQ ID NO: 1126 - DNA, 25 bp, Artificial Sequence
  source: /note="Description of Artificial Sequence: Synthetic probe"
ctcactgcccgtgtgcagaaaccgg

SEQ ID NO: 1127 - DNA, 25 bp, Artificial Sequence
  source: /note="Description of Artificial Sequence: Synthetic probe"
aaccggatatgaagccccgagtctc

SEQ ID NO: 1128 - DNA, 25 bp, Artificial Sequence
  source: /note="Description of Artificial Sequence: Synthetic probe"
caggacttcatcatgctgcagaaca

SEQ ID NO: 1129 - DNA, 25 bp, Artificial Sequence
  source: /note="Description of Artificial Sequence: Synthetic probe"
gcgcagtacctggccacttatggcc

SEQ ID NO: 1130 - DNA, 25 bp, Artificial Sequence
  source: /note="Description of Artificial Sequence: Synthetic probe"
agccccttcagctataccggaaagg

SEQ ID NO: 1131 - DNA, 25 bp, Artificial Sequence
  source: /note="Description of Artificial Sequence: Synthetic probe"
gggttttggcagcgtcaagtcagag

SEQ ID NO: 1132 - DNA, 25 bp, Artificial Sequence
  source: /note="Description of Artificial Sequence: Synthetic probe"
gagacagtctcatcgcagtctcagc

SEQ ID NO: 1133 - DNA, 25 bp, Artificial Sequence
  source: /note="Description of Artificial Sequence: Synthetic probe"
ccaccccatactggatcctgaagaa

SEQ ID NO: 1134 - DNA, 25 bp, Artificial Sequence
  source: /note="Description of Artificial Sequence: Synthetic probe"
ccaacgcaaattcgcaaactttctt

SEQ ID NO: 1135 - DNA, 25 bp, Artificial Sequence
  source: /note="Description of Artificial Sequence: Synthetic probe"
gctcatcggctatcgttagtgctag

SEQ ID NO: 1136 - DNA, 25 bp, Artificial Sequence
  source: /note="Description of Artificial Sequence: Synthetic probe"
tgctagtggattttacatgtggccc

SEQ ID NO: 1137 - DNA, 25 bp, Artificial Sequence
  source: /note="Description of Artificial Sequence: Synthetic probe"
agattggatacgcatcagacagatg

SEQ ID NO: 1138 - DNA, 25 bp, Artificial Sequence
  source: /note="Description of Artificial Sequence: Synthetic probe"
gaggtggctgggtttacacgctaat

SEQ ID NO: 1139 - DNA, 25 bp, Artificial Sequence
  source: /note="Description of Artificial Sequence: Synthetic probe"
gggtttacacgctaatcccgattca

SEQ ID NO: 1140 - DNA, 25 bp, Artificial Sequence
  source: /note="Description of Artificial Sequence: Synthetic probe"
gcagtcacagctacacagatcacag

SEQ ID NO: 1141 - DNA, 25 bp, Artificial Sequence
  source: /note="Description of Artificial Sequence: Synthetic probe"
gccttcattgccttaactggagccc

SEQ ID NO: 1142 - DNA, 25 bp, Artificial Sequence
  source: /note="Description of Artificial Sequence: Synthetic probe"
caatgctttgcccctgagacaaatg

SEQ ID NO: 1143 - DNA, 25 bp, Artificial Sequence
  source: /note="Description of Artificial Sequence: Synthetic probe"
gacaaatggaggcctgtcctgacct

SEQ ID NO: 1144 - DNA, 25 bp, Artificial Sequence
  source: /note="Description of Artificial Sequence: Synthetic probe"
acctgtctcaccatgtacatagctt

SEQ ID NO: 1145 - DNA, 25 bp, Artificial Sequence
  source: /note="Description of Artificial Sequence: Synthetic probe"
aagatcctggagtttgtggggcgct

SEQ ID NO: 1146 - DNA, 25 bp, Artificial Sequence
  source: /note="Description of Artificial Sequence: Synthetic probe"
agcacacgtcgttcaaggagatgaa

SEQ ID NO: 1147 - DNA, 25 bp, Artificial Sequence
  source: /note="Description of Artificial Sequence: Synthetic probe"
agaagaaccctatgaccaactacac

SEQ ID NO: 1148 - DNA, 25 bp, Artificial Sequence
  source: /note="Description of Artificial Sequence: Synthetic probe"
ggagttcatggaccacagcatctcc

SEQ ID NO: 1149 - DNA, 25 bp, Artificial Sequence
  source: /note="Description of Artificial Sequence: Synthetic probe"
catctcccccttcatgaggaaaggc

SEQ ID NO: 1150 - DNA, 25 bp, Artificial Sequence
  source: /note="Description of Artificial Sequence: Synthetic probe"
ttcaccgtggcgcagaatgagcgct

SEQ ID NO: 1151 - DNA, 25 bp, Artificial Sequence
  source: /note="Description of Artificial Sequence: Synthetic probe"
gcagaatgagcgcttcgatgcggac

SEQ ID NO: 1152 - DNA, 25 bp, Artificial Sequence
  source: /note="Description of Artificial Sequence: Synthetic probe"
gggagtgtgcgaatcaaacctgacc

SEQ ID NO: 1153 - DNA, 25 bp, Artificial Sequence
  source: /note="Description of Artificial Sequence: Synthetic probe"
gtgcgaatcaaacctgaccaagcgg

SEQ ID NO: 1154 - DNA, 25 bp, Artificial Sequence
  source: /note="Description of Artificial Sequence: Synthetic probe"
ggacggtaggtcatgtctgtaatcc

SEQ ID NO: 1155 - DNA, 25 bp, Artificial Sequence
  source: /note="Description of Artificial Sequence: Synthetic probe"
gtgggccaggcagagtggctcatgc

SEQ ID NO: 1156 - DNA, 25 bp, Artificial Sequence
  source: /note="Description of Artificial Sequence: Synthetic probe"
gaaaatggtttgccgctggagtatc

SEQ ID NO: 1157 - DNA, 25 bp, Artificial Sequence
  source: /note="Description of Artificial Sequence: Synthetic probe"
atctaagggtattctatgtgctaat

SEQ ID NO: 1158 - DNA, 25 bp, Artificial Sequence
  source: /note="Description of Artificial Sequence: Synthetic probe"
atctgggggatctccacgtttgatc

SEQ ID NO: 1159 - DNA, 25 bp, Artificial Sequence
  source: /note="Description of Artificial Sequence: Synthetic probe"
cagcagtgctctgaaggagtatctt

SEQ ID NO: 1160 - DNA, 25 bp, Artificial Sequence
  source: /note="Description of Artificial Sequence: Synthetic probe"
ggagtatcttacttgggtgattcct

SEQ ID NO: 1161 - DNA, 25 bp, Artificial Sequence
  source: /note="Description of Artificial Sequence: Synthetic probe"
gggtgattccttgtttttagactat

SEQ ID NO: 1162 - DNA, 25 bp, Artificial Sequence
  source: /note="Description of Artificial Sequence: Synthetic probe"
acaaatgaatgtgagtaccccttct

SEQ ID NO: 1163 - DNA, 25 bp, Artificial Sequence
  source: /note="Description of Artificial Sequence: Synthetic probe"
attgatcttaagtgtctccttgctc

SEQ ID NO: 1164 - DNA, 25 bp, Artificial Sequence
  source: /note="Description of Artificial Sequence: Synthetic probe"
gtgtctccttgctctggtaaaagat

SEQ ID NO: 1165 - DNA, 25 bp, Artificial Sequence
  source: /note="Description of Artificial Sequence: Synthetic probe"
agatagatttgtagctcacttgatg

SEQ ID NO: 1166 - DNA, 25 bp, Artificial Sequence
  source: /note="Description of Artificial Sequence: Synthetic probe"
gaattgctctgctctgtctgagatt

SEQ ID NO: 1167 - DNA, 25 bp, Artificial Sequence
  source: /note="Description of Artificial Sequence: Synthetic probe"
caatgtccacagccagggagcagcc

SEQ ID NO: 1168 - DNA, 25 bp, Artificial Sequence
  source: /note="Description of Artificial Sequence: Synthetic probe"
gggcgcacgtgttccaaattgaccc

SEQ ID NO: 1169 - DNA, 25 bp, Artificial Sequence
  source: /note="Description of Artificial Sequence: Synthetic probe"
gtaccgcatcatcagcatcggaggc

SEQ ID NO: 1170 - DNA, 25 bp, Artificial Sequence
  source: /note="Description of Artificial Sequence: Synthetic probe"
ggccatcatcaacagcactgtcact

SEQ ID NO: 1171 - DNA, 25 bp, Artificial Sequence
  source: /note="Description of Artificial Sequence: Synthetic probe"
aagttcgggcagtgggccgacagtc

SEQ ID NO: 1172 - DNA, 25 bp, Artificial Sequence
  source: /note="Description of Artificial Sequence: Synthetic probe"
agtcgcgccaacacagtctatggcc

SEQ ID NO: 1173 - DNA, 25 bp, Artificial Sequence
  source: /note="Description of Artificial Sequence: Synthetic probe"
gctttgcctctgaacagcatctgac

SEQ ID NO: 1174 - DNA, 25 bp, Artificial Sequence
  source: /note="Description of Artificial Sequence: Synthetic probe"
gacacagtttgccgagaagttccag

SEQ ID NO: 1175 - DNA, 25 bp, Artificial Sequence
  source: /note="Description of Artificial Sequence: Synthetic probe"
cccagtcggctctggttgttggcag

SEQ ID NO: 1176 - DNA, 25 bp, Artificial Sequence
  source: /note="Description of Artificial Sequence: Synthetic probe"
tggggctgtttttgagcttctcatt

SEQ ID NO: 1177 - DNA, 25 bp, Artificial Sequence
  source: /note="Description of Artificial Sequence: Synthetic probe"
gagggacactcatagtccctcctct

SEQ ID NO: 1178 - DNA, 25 bp, Artificial Sequence
  source: /note="Description of Artificial Sequence: Synthetic probe"
tcctgcaggtatggtcagaacccag

SEQ ID NO: 1179 - DNA, 25 bp, Artificial Sequence
  source: /note="Description of Artificial Sequence: Synthetic probe"
tggagattccggtctcaggagcagc

SEQ ID NO: 1180 - DNA, 25 bp, Artificial Sequence
  source: /note="Description of Artificial Sequence: Synthetic probe"
gagcagctgataacctcagtccgtc

SEQ ID NO: 1181 - DNA, 25 bp, Artificial Sequence
  source: /note="Description of Artificial Sequence: Synthetic probe"
tgcctcacaccttcaggattacgca

SEQ ID NO: 1182 - DNA, 25 bp, Artificial Sequence
  source: /note="Description of Artificial Sequence: Synthetic probe"
ggtccttgggattctgatatttcag

SEQ ID NO: 1183 - DNA, 25 bp, Artificial Sequence
  source: /note="Description of Artificial Sequence: Synthetic probe"
aatgcaccattgaatgctggagcct

SEQ ID NO: 1184 - DNA, 25 bp, Artificial Sequence
  source: /note="Description of Artificial Sequence: Synthetic probe"
gctggagccttggaagcgaatctga

SEQ ID NO: 1185 - DNA, 25 bp, Artificial Sequence
  source: /note="Description of Artificial Sequence: Synthetic probe"
gcgaatctgatggtcctaggaggtt

SEQ ID NO: 1186 - DNA, 25 bp, Artificial Sequence
  source: /note="Description of Artificial Sequence: Synthetic probe"
ggttcgggaagaccatctgaggcct

SEQ ID NO: 1187 - DNA, 25 bp, Artificial Sequence
  source: /note="Description of Artificial Sequence: Synthetic probe"
tgaggcctatgccatctggactgtc

SEQ ID NO: 1188 - DNA, 25 bp, Artificial Sequence
  source: /note="Description of Artificial Sequence: Synthetic probe"
tggactgtctgctggcaatttcttt

SEQ ID NO: 1189 - DNA, 25 bp, Artificial Sequence
  source: /note="Description of Artificial Sequence: Synthetic probe"
cgcgcgcggacgggagggaagcgtc

SEQ ID NO: 1190 - DNA, 25 bp, Artificial Sequence
  source: /note="Description of Artificial Sequence: Synthetic probe"
tgcccgtaatttatcgcgcttacta

SEQ ID NO: 1191 - DNA, 25 bp, Artificial Sequence
  source: /note="Description of Artificial Sequence: Synthetic probe"
gaagaagcagaagacctccgagcct

SEQ ID NO: 1192 - DNA, 25 bp, Artificial Sequence
  source: /note="Description of Artificial Sequence: Synthetic probe"
agccttgcgatttctatctgtgatt

SEQ ID NO: 1193 - DNA, 25 bp, Artificial Sequence
  source: /note="Description of Artificial Sequence: Synthetic probe"
gccatgcgcaacctctatgcgatgc

SEQ ID NO: 1194 - DNA, 25 bp, Artificial Sequence
  source: /note="Description of Artificial Sequence: Synthetic probe"
gatttcaattgtggacccttggatt

SEQ ID NO: 1195 - DNA, 25 bp, Artificial Sequence
  source: /note="Description of Artificial Sequence: Synthetic probe"
ttttcagatctccagtatttcggat

SEQ ID NO: 1196 - DNA, 25 bp, Artificial Sequence
  source: /note="Description of Artificial Sequence: Synthetic probe"
tttcacaagattttcattagacctc

SEQ ID NO: 1197 - DNA, 25 bp, Artificial Sequence
  source: /note="Description of Artificial Sequence: Synthetic probe"
agacctcttaggtacaggagccggt

SEQ ID NO: 1198 - DNA, 25 bp, Artificial Sequence
  source: /note="Description of Artificial Sequence: Synthetic probe"
aacatggaatccagtctgtgacagt

SEQ ID NO: 1199 - DNA, 25 bp, Artificial Sequence
  source: /note="Description of Artificial Sequence: Synthetic probe"
cagtctgtgacagtgtttttcactc

SEQ ID NO: 1200 - DNA, 25 bp, Artificial Sequence
  source: /note="Description of Artificial Sequence: Synthetic probe"
gctttctgcctgacacagttgtcga

SEQ ID NO: 1201 - DNA, 25 bp, Artificial Sequence
  source: /note="Description of Artificial Sequence: Synthetic probe"
aagacctattgtcaaccttgcttca

SEQ ID NO: 1202 - DNA, 25 bp, Artificial Sequence
  source: /note="Description of Artificial Sequence: Synthetic probe"
tcttcccactgtaatgccaactgat

SEQ ID NO: 1203 - DNA, 25 bp, Artificial Sequence
  source: /note="Description of Artificial Sequence: Synthetic probe"
ccaactgatccatagcctcttcaga

SEQ ID NO: 1204 - DNA, 25 bp, Artificial Sequence
  source: /note="Description of Artificial Sequence: Synthetic probe"
ctgttactgaccttctgcttaatag

SEQ ID NO: 1205 - DNA, 25 bp, Artificial Sequence
  source: /note="Description of Artificial Sequence: Synthetic probe"
gttagatctaggtccttctatctcg

SEQ ID NO: 1206 - DNA, 25 bp, Artificial Sequence
  source: /note="Description of Artificial Sequence: Synthetic probe"
tatctcgtccctctacagatgtatt

SEQ ID NO: 1207 - DNA, 25 bp, Artificial Sequence
  source: /note="Description of Artificial Sequence: Synthetic probe"
tttcacctctagtgatggccctact

SEQ ID NO: 1208 - DNA, 25 bp, Artificial Sequence
  source: /note="Description of Artificial Sequence: Synthetic probe"
actcatatcttctctaatttggtcc

SEQ ID NO: 1209 - DNA, 25 bp, Artificial Sequence
  source: /note="Description of Artificial Sequence: Synthetic probe"
ggtcctgatacttgtttcttttcac

SEQ ID NO: 1210 - DNA, 25 bp, Artificial Sequence
  source: /note="Description of Artificial Sequence: Synthetic probe"
gtggctcactgtcttacaatcactg

SEQ ID NO: 1211 - DNA, 25 bp, Artificial Sequence
  source: /note="Description of Artificial Sequence: Synthetic probe"
ccaccctctggatcccaatattgag

SEQ ID NO: 1212 - DNA, 25 bp, Artificial Sequence
  source: /note="Description of Artificial Sequence: Synthetic probe"
ttatcctcagggaatcctcacttag

SEQ ID NO: 1213 - DNA, 25 bp, Artificial Sequence
  source: /note="Description of Artificial Sequence: Synthetic probe"
cctcacttagacccctgtaacaggt

SEQ ID NO: 1214 - DNA, 25 bp, Artificial Sequence
  source: /note="Description of Artificial Sequence: Synthetic probe"
aaatcttcatggtgttctgtttcct

SEQ ID NO: 1215 - DNA, 25 bp, Artificial Sequence
  source: /note="Description of Artificial Sequence: Synthetic probe"
gtgttctgtttcctaggaacttctt

SEQ ID NO: 1216 - DNA, 25 bp, Artificial Sequence
  source: /note="Description of Artificial Sequence: Synthetic probe"
taataagtgtttatctttcccacct

SEQ ID NO: 1217 - DNA, 25 bp, Artificial Sequence
  source: /note="Description of Artificial Sequence: Synthetic probe"
atctttcccacctactcaaagtagt

SEQ ID NO: 1218 - DNA, 25 bp, Artificial Sequence
  source: /note="Description of Artificial Sequence: Synthetic probe"
gtagttccaagattagggctagttt

SEQ ID NO: 1219 - DNA, 25 bp, Artificial Sequence
  source: /note="Description of Artificial Sequence: Synthetic probe"
gtggaccactgtaaacgagggccta

SEQ ID NO: 1220 - DNA, 25 bp, Artificial Sequence
  source: /note="Description of Artificial Sequence: Synthetic probe"
cgagggcctagttcagtgtctgcct

SEQ ID NO: 1221 - DNA, 25 bp, Artificial Sequence
  source: /note="Description of Artificial Sequence: Synthetic probe"
gggaagcttccaataaatacctttg

SEQ ID NO: 1222 - DNA, 25 bp, Artificial Sequence
  source: /note="Description of Artificial Sequence: Synthetic probe"
gtctctgaagtatttcctccagttt

SEQ ID NO: 1223 - DNA, 25 bp, Artificial Sequence
  source: /note="Description of Artificial Sequence: Synthetic probe"
gggcccctatgtttgagtttgatgg

SEQ ID NO: 1224 - DNA, 25 bp, Artificial Sequence
  source: /note="Description of Artificial Sequence: Synthetic probe"
ggatcctcactcaacgaaaactcgg

SEQ ID NO: 1225 - DNA, 25 bp, Artificial Sequence
  source: /note="Description of Artificial Sequence: Synthetic probe"
ctcggttggaaactgttccgcctgg

SEQ ID NO: 1226 - DNA, 25 bp, Artificial Sequence
  source: /note="Description of Artificial Sequence: Synthetic probe"
gacttgctcatttagactgttcacg

SEQ ID NO: 1227 - DNA, 25 bp, Artificial Sequence
  source: /note="Description of Artificial Sequence: Synthetic probe"
gagtctgaatctgccaacgtggtgt

SEQ ID NO: 1228 - DNA, 25 bp, Artificial Sequence
  source: /note="Description of Artificial Sequence: Synthetic probe"
tcagggcaactttccccatacagga

SEQ ID NO: 1229 - DNA, 25 bp, Artificial Sequence
  source: /note="Description of Artificial Sequence: Synthetic probe"
tacatcaacagtctacgtcacagcc

SEQ ID NO: 1230 - DNA, 25 bp, Artificial Sequence
  source: /note="Description of Artificial Sequence: Synthetic probe"
gtgctttctagcaaacggttctgtt

SEQ ID NO: 1231 - DNA, 25 bp, Artificial Sequence
  source: /note="Description of Artificial Sequence: Synthetic probe"
tagcgagtcactgttgattctgctg

SEQ ID NO: 1232 - DNA, 25 bp, Artificial Sequence
  source: /note="Description of Artificial Sequence: Synthetic probe"
ataccgtgtaactaatcccgtggat

SEQ ID NO: 1233 - DNA, 25 bp, Artificial Sequence
  source: /note="Description of Artificial Sequence: Synthetic probe"
gttgacctgtcatagccttgttaaa

SEQ ID NO: 1234 - DNA, 25 bp, Artificial Sequence
  source: /note="Description of Artificial Sequence: Synthetic probe"
tcaaagacaacaaacccagctcatc

SEQ ID NO: 1235 - DNA, 25 bp, Artificial Sequence
  source: /note="Description of Artificial Sequence: Synthetic probe"
gctcatcctccagcttgatgggaag

SEQ ID NO: 1236 - DNA, 25 bp, Artificial Sequence
  source: /note="Description of Artificial Sequence: Synthetic probe"
gggtttatgtcctaactgctttgta

SEQ ID NO: 1237 - DNA, 25 bp, Artificial Sequence
  source: /note="Description of Artificial Sequence: Synthetic probe"
gaaggtgaacatgatgtccctcaca

SEQ ID NO: 1238 - DNA, 25 bp, Artificial Sequence
  source: /note="Description of Artificial Sequence: Synthetic probe"
gcttgggctacgaatgctgtttgca

SEQ ID NO: 1239 - DNA, 25 bp, Artificial Sequence
  source: /note="Description of Artificial Sequence: Synthetic probe"
agactgttgccgtcaattttctctt

SEQ ID NO: 1240 - DNA, 25 bp, Artificial Sequence
  source: /note="Description of Artificial Sequence: Synthetic probe"
aattttctcttgactgccaagttat

SEQ ID NO: 1241 - DNA, 25 bp, Artificial Sequence
  source: /note="Description of Artificial Sequence: Synthetic probe"
ttttcttgtaaggctgactggcatg

SEQ ID NO: 1242 - DNA, 25 bp, Artificial Sequence
  source: /note="Description of Artificial Sequence: Synthetic probe"
gaagctacactcctgaagaaaccaa

SEQ ID NO: 1243 - DNA, 25 bp, Artificial Sequence
  source: /note="Description of Artificial Sequence: Synthetic probe"
aaaaatgcatctccttggcttctga

SEQ ID NO: 1244 - DNA, 25 bp, Artificial Sequence
  source: /note="Description of Artificial Sequence: Synthetic probe"
tctcctttctcaccaatgggcaata

SEQ ID NO: 1245 - DNA, 25 bp, Artificial Sequence
  source: /note="Description of Artificial Sequence: Synthetic probe"
tcctttctcaccaatgggcaatagc

SEQ ID NO: 1246 - DNA, 25 bp, Artificial Sequence
  source: /note="Description of Artificial Sequence: Synthetic probe"
tatttttcccaaagatagctttact

SEQ ID NO: 1247 - DNA, 25 bp, Artificial Sequence
  source: /note="Description of Artificial Sequence: Synthetic probe"
gtcaaattaatgcatgctccttaca

SEQ ID NO: 1248 - DNA, 25 bp, Artificial Sequence
  source: /note="Description of Artificial Sequence: Synthetic probe"
aatgcatgctccttacaacaaacaa

SEQ ID NO: 1249 - DNA, 25 bp, Artificial Sequence
  source: /note="Description of Artificial Sequence: Synthetic probe"
atgctccttacaacaaacaaatatc

SEQ ID NO: 1250 - DNA, 25 bp, Artificial Sequence
  source: /note="Description of Artificial Sequence: Synthetic probe"
gagtttaggaattctactagccaga

SEQ ID NO: 1251 - DNA, 25 bp, Artificial Sequence
  source: /note="Description of Artificial Sequence: Synthetic probe"
actagccagagatagtcacttggag

SEQ ID NO: 1252 - DNA, 25 bp, Artificial Sequence
  source: /note="Description of Artificial Sequence: Synthetic probe"
gatagtcacttggagaaactttcta

SEQ ID NO: 1253 - DNA, 25 bp, Artificial Sequence
  source: /note="Description of Artificial Sequence: Synthetic probe"
gaaactttctatatatccttctaaa

SEQ ID NO: 1254 - DNA, 25 bp, Artificial Sequence
  source: /note="Description of Artificial Sequence: Synthetic probe"
caccccactgataaccaaatcacag

SEQ ID NO: 1255 - DNA, 25 bp, Artificial Sequence
  source: /note="Description of Artificial Sequence: Synthetic probe"
gggaccgctataaggccagtcggac

SEQ ID NO: 1256 - DNA, 25 bp, Artificial Sequence
  source: /note="Description of Artificial Sequence: Synthetic probe"
tcgtggccatcttccacaagtactc

SEQ ID NO: 1257 - DNA, 25 bp, Artificial Sequence
  source: /note="Description of Artificial Sequence: Synthetic probe"
ttccacaagtactccggcagggagg

SEQ ID NO: 1258 - DNA, 25 bp, Artificial Sequence
  source: /note="Description of Artificial Sequence: Synthetic probe"
ccgctataaggccagtcggactgcg

SEQ ID NO: 1259 - DNA, 25 bp, Artificial Sequence
  source: /note="Description of Artificial Sequence: Synthetic probe"
tccggcagggagggtgacaagcaca

SEQ ID NO: 1260 - DNA, 25 bp, Artificial Sequence
  source: /note="Description of Artificial Sequence: Synthetic probe"
gacaagcacaccctgagcaagaagg

SEQ ID NO: 1261 - DNA, 25 bp, Artificial Sequence
  source: /note="Description of Artificial Sequence: Synthetic probe"
gctgatccagaaggagctcaccatt

SEQ ID NO: 1262 - DNA, 25 bp, Artificial Sequence
  source: /note="Description of Artificial Sequence: Synthetic probe"
gaaggagctcaccattggctcgaag

SEQ ID NO: 1263 - DNA, 25 bp, Artificial Sequence
  source: /note="Description of Artificial Sequence: Synthetic probe"
agctcaccattggctcgaagctgca

SEQ ID NO: 1264 - DNA, 25 bp, Artificial Sequence
  source: /note="Description of Artificial Sequence: Synthetic probe"
ctcaccattggctcgaagctgcagg

SEQ ID NO: 1265 - DNA, 25 bp, Artificial Sequence
  source: /note="Description of Artificial Sequence: Synthetic probe"
gccagtcggactgcgacatagccca

SEQ ID NO: 1266 - DNA, 25 bp, Artificial Sequence
  source: /note="Description of Artificial Sequence: Synthetic probe"
aacattgtaatggccatcgctggaa

SEQ ID NO: 1267 - DNA, 25 bp, Artificial Sequence
  source: /note="Description of Artificial Sequence: Synthetic probe"
gaaacaagtgcgacctctcagatat

SEQ ID NO: 1268 - DNA, 25 bp, Artificial Sequence
  source: /note="Description of Artificial Sequence: Synthetic probe"
ggaggttcccctgaaggatgctaag

SEQ ID NO: 1269 - DNA, 25 bp, Artificial Sequence
  source: /note="Description of Artificial Sequence: Synthetic probe"
tacgctgaatccataggtgccatcg

SEQ ID NO: 1270 - DNA, 25 bp, Artificial Sequence
  source: /note="Description of Artificial Sequence: Synthetic probe"
gtgccatcgtggttgagacaagtgc

SEQ ID NO: 1271 - DNA, 25 bp, Artificial Sequence
  source: /note="Description of Artificial Sequence: Synthetic probe"
ttcaaggaatcagccgccagatccc

SEQ ID NO: 1272 - DNA, 25 bp, Artificial Sequence
  source: /note="Description of Artificial Sequence: Synthetic probe"
tgagaagccaaccatgcaagccagc

SEQ ID NO: 1273 - DNA, 25 bp, Artificial Sequence
  source: /note="Description of Artificial Sequence: Synthetic probe"
cgtggtccacggtacttgaagaagc

SEQ ID NO: 1274 - DNA, 25 bp, Artificial Sequence
  source: /note="Description of Artificial Sequence: Synthetic probe"
atcctgtgcactgctgaaggaccct

SEQ ID NO: 1275 - DNA, 25 bp, Artificial Sequence
  source: /note="Description of Artificial Sequence: Synthetic probe"
gagtgagcacactggctttgcatcc

SEQ ID NO: 1276 - DNA, 25 bp, Artificial Sequence
  source: /note="Description of Artificial Sequence: Synthetic probe"
accaccacaaaatggcctttagtgt

SEQ ID NO: 1277 - DNA, 25 bp, Artificial Sequence
  source: /note="Description of Artificial Sequence: Synthetic probe"
gatcatcgacgccatcaggcaggag

SEQ ID NO: 1278 - DNA, 25 bp, Artificial Sequence
  source: /note="Description of Artificial Sequence: Synthetic probe"
tgggatcagcaccacgtaaggggcc

SEQ ID NO: 1279 - DNA, 25 bp, Artificial Sequence
  source: /note="Description of Artificial Sequence: Synthetic probe"
cccatccggcgacagaggacagcca

SEQ ID NO: 1280 - DNA, 25 bp, Artificial Sequence
  source: /note="Description of Artificial Sequence: Synthetic probe"
gtgcaccagagcacgcacaggagcc

SEQ ID NO: 1281 - DNA, 25 bp, Artificial Sequence
  source: /note="Description of Artificial Sequence: Synthetic probe"
tgaaacgtcctgacctgtgatcaca

SEQ ID NO: 1282 - DNA, 25 bp, Artificial Sequence
  source: /note="Description of Artificial Sequence: Synthetic probe"
ggaaaccaagtgcaactcctgggtt

SEQ ID NO: 1283 - DNA, 25 bp, Artificial Sequence
  source: /note="Description of Artificial Sequence: Synthetic probe"
tcctgggtttttttagattctgcct

SEQ ID NO: 1284 - DNA, 25 bp, Artificial Sequence
  source: /note="Description of Artificial Sequence: Synthetic probe"
tagattctgcctgacacggaacacc

SEQ ID NO: 1285 - DNA, 25 bp, Artificial Sequence
  source: /note="Description of Artificial Sequence: Synthetic probe"
ctgacacggaacaccaggtctgctc

SEQ ID NO: 1286 - DNA, 25 bp, Artificial Sequence
  source: /note="Description of Artificial Sequence: Synthetic probe"
ggtacatttctttgggtttctagag

SEQ ID NO: 1287 - DNA, 25 bp, Artificial Sequence
  source: /note="Description of Artificial Sequence: Synthetic probe"
tcattagacggtttccaggttttct

SEQ ID NO: 1288 - DNA, 25 bp, Artificial Sequence
  source: /note="Description of Artificial Sequence: Synthetic probe"
ggtgtagtggctttttggctcagca

SEQ ID NO: 1289 - DNA, 25 bp, Artificial Sequence
  source: /note="Description of Artificial Sequence: Synthetic probe"
ggctcagcatccagaaacaccaaac

SEQ ID NO: 1290 - DNA, 25 bp, Artificial Sequence
  source: /note="Description of Artificial Sequence: Synthetic probe"
ggctggctaaacaagtggccgcgtg

SEQ ID NO: 1291 - DNA, 25 bp, Artificial Sequence
  source: /note="Description of Artificial Sequence: Synthetic probe"
cagctctgagtcaaatctgggccct

SEQ ID NO: 1292 - DNA, 25 bp, Artificial Sequence
  source: /note="Description of Artificial Sequence: Synthetic probe"
cccactcccttgctaggggtgaaag

SEQ ID NO: 1293 - DNA, 25 bp, Artificial Sequence
  source: /note="Description of Artificial Sequence: Synthetic probe"
gagccatctatccaagaagccttca

SEQ ID NO: 1294 - DNA, 25 bp, Artificial Sequence
  source: /note="Description of Artificial Sequence: Synthetic probe"
ctgttctggactctgatgtgtgtgg

SEQ ID NO: 1295 - DNA, 25 bp, Artificial Sequence
  source: /note="Description of Artificial Sequence: Synthetic probe"
gccagcctgaccttttaataacttt

SEQ ID NO: 1296 - DNA, 25 bp, Artificial Sequence
  source: /note="Description of Artificial Sequence: Synthetic probe"
gcacctgtttaagcattgtacccct

SEQ ID NO: 1297 - DNA, 25 bp, Artificial Sequence
  source: /note="Description of Artificial Sequence: Synthetic probe"
gttaaagatttgtgtcctctcattc

SEQ ID NO: 1298 - DNA, 25 bp, Artificial Sequence
  source: /note="Description of Artificial Sequence: Synthetic probe"
tcctcttgtaagtgcccttctaata

SEQ ID NO: 1299 - DNA, 25 bp, Artificial Sequence
  source: /note="Description of Artificial Sequence: Synthetic probe"
agccaagccaacactggaggcgtcc

SEQ ID NO: 1300 - DNA, 25 bp, Artificial Sequence
  source: /note="Description of Artificial Sequence: Synthetic probe"
ataacgagggatcactgctggccta

SEQ ID NO: 1301 - DNA, 25 bp, Artificial Sequence
  source: /note="Description of Artificial Sequence: Synthetic probe"
ctactctggttacggggacactgac

SEQ ID NO: 1302 - DNA, 25 bp, Artificial Sequence
  source: /note="Description of Artificial Sequence: Synthetic probe"
tagccagtaacatctgggccgccta

SEQ ID NO: 1303 - DNA, 25 bp, Artificial Sequence
  source: /note="Description of Artificial Sequence: Synthetic probe"
aatctcaaattcatcctcatggact

SEQ ID NO: 1304 - DNA, 25 bp, Artificial Sequence
  source: /note="Description of Artificial Sequence: Synthetic probe"
tggactgcatggagggccgtgtagc

SEQ ID NO: 1305 - DNA, 25 bp, Artificial Sequence
  source: /note="Description of Artificial Sequence: Synthetic probe"
gagaggcacctcggagatctgggtg

SEQ ID NO: 1306 - DNA, 25 bp, Artificial Sequence
  source: /note="Description of Artificial Sequence: Synthetic probe"
gaccgtgggctttggaatgctcaag

SEQ ID NO: 1307 - DNA, 25 bp, Artificial Sequence
  source: /note="Description of Artificial Sequence: Synthetic probe"
aagtggcggcatcttaacggcattg

SEQ ID NO: 1308 - DNA, 25 bp, Artificial Sequence
  source: /note="Description of Artificial Sequence: Synthetic probe"
ggttaggaaccgtagcatgctgcgc

SEQ ID NO: 1309 - DNA, 25 bp, Artificial Sequence
  source: /note="Description of Artificial Sequence: Synthetic probe"
ccaaggctttgacccaggtgctaag

SEQ ID NO: 1310 - DNA, 25 bp, Artificial Sequence
  source: /note="Description of Artificial Sequence: Synthetic probe"
cctacaggagcgggagaagattgtg

SEQ ID NO: 1311 - DNA, 25 bp, Artificial Sequence
  source: /note="Description of Artificial Sequence: Synthetic probe"
gaagattgtggctcccatcagtgac

SEQ ID NO: 1312 - DNA, 25 bp, Artificial Sequence
  source: /note="Description of Artificial Sequence: Synthetic probe"
ctcacactacctgtcctgaatgcag

SEQ ID NO: 1313 - DNA, 25 bp, Artificial Sequence
  source: /note="Description of Artificial Sequence: Synthetic probe"
acctgtcctgaatgcagcacgaact

SEQ ID NO: 1314 - DNA, 25 bp, Artificial Sequence
  source: /note="Description of Artificial Sequence: Synthetic probe"
cagcacgaactgtcatctttgtggc

SEQ ID NO: 1315 - DNA, 25 bp, Artificial Sequence
  source: /note="Description of Artificial Sequence: Synthetic probe"
gtggcaactggagaaggcaaggcag

SEQ ID NO: 1316 - DNA, 25 bp, Artificial Sequence
  source: /note="Description of Artificial Sequence: Synthetic probe"
ggcaaggcagctgttctgaagcgca

SEQ ID NO: 1317 - DNA, 25 bp, Artificial Sequence
  source: /note="Description of Artificial Sequence: Synthetic probe"
ggcagctgttctgaagcgcattttg

SEQ ID NO: 1318 - DNA, 25 bp, Artificial Sequence
  source: /note="Description of Artificial Sequence: Synthetic probe"
aagcgcattttggaggaccaggagg

SEQ ID NO: 1319 - DNA, 25 bp, Artificial Sequence
  source: /note="Description of Artificial Sequence: Synthetic probe"
ccccacaccgggaaactgtgctggt

SEQ ID NO: 1320 - DNA, 25 bp, Artificial Sequence
  source: /note="Description of Artificial Sequence: Synthetic probe"
gaaactgtgctggttcttggacgag

SEQ ID NO: 1321 - DNA, 25 bp, Artificial Sequence
  source: /note="Description of Artificial Sequence: Synthetic probe"
ctgccccgagctcgaagaagaggct

SEQ ID NO: 1322 - DNA, 25 bp, Artificial Sequence
  source: /note="Description of Artificial Sequence: Synthetic probe"
aagaagaggctgagtgcgtccctga

SEQ ID NO: 1323 - DNA, 25 bp, Artificial Sequence
  source: /note="Description of Artificial Sequence: Synthetic probe"
gtccctgataactgcgtctaagacc

SEQ ID NO: 1324 - DNA, 25 bp, Artificial Sequence
  source: /note="Description of Artificial Sequence: Synthetic probe"
gccggcacgggcattgggaaacagc

SEQ ID NO: 1325 - DNA, 25 bp, Artificial Sequence
  source: /note="Description of Artificial Sequence: Synthetic probe"
aggataaagtcatccccaaggctcc

SEQ ID NO: 1326 - DNA, 25 bp, Artificial Sequence
  source: /note="Description of Artificial Sequence: Synthetic probe"
aaggctccagctactctaaattatg

SEQ ID NO: 1327 - DNA, 25 bp, Artificial Sequence
  source: /note="Description of Artificial Sequence: Synthetic probe"
ccaggagattgtccttcatcgtcca

SEQ ID NO: 1328 - DNA, 25 bp, Artificial Sequence
  source: /note="Description of Artificial Sequence: Synthetic probe"
ctcccacgtggttgcagatacctca

SEQ ID NO: 1329 - DNA, 25 bp, Artificial Sequence
  source: /note="Description of Artificial Sequence: Synthetic probe"
tgcagatacctcagacctggtgctc

SEQ ID NO: 1330 - DNA, 25 bp, Artificial Sequence
  source: /note="Description of Artificial Sequence: Synthetic probe"
catccaagcgggggccacttgagaa

SEQ ID NO: 1331 - DNA, 25 bp, Artificial Sequence
  source: /note="Description of Artificial Sequence: Synthetic probe"
aagcgtcagtgtttccatgttatgg

SEQ ID NO: 1332 - DNA, 25 bp, Artificial Sequence
  source: /note="Description of Artificial Sequence: Synthetic probe"
ccagttgtggtcctcagcatttgaa

SEQ ID NO: 1333 - DNA, 25 bp, Artificial Sequence
  source: /note="Description of Artificial Sequence: Synthetic probe"
gaaatcgaccattgtactactctca

SEQ ID NO: 1334 - DNA, 25 bp, Artificial Sequence
  source: /note="Description of Artificial Sequence: Synthetic probe"
gtactactctcacttacagcagtta

SEQ ID NO: 1335 - DNA, 25 bp, Artificial Sequence
  source: /note="Description of Artificial Sequence: Synthetic probe"
aaaacctgtctgcatttccattttt

SEQ ID NO: 1336 - DNA, 25 bp, Artificial Sequence
  source: /note="Description of Artificial Sequence: Synthetic probe"
gagctggtgttgtatcttcaagtcc

SEQ ID NO: 1337 - DNA, 25 bp, Artificial Sequence
  source: /note="Description of Artificial Sequence: Synthetic probe"
tatgcgtatttgcagacctttcctg

SEQ ID NO: 1338 - DNA, 25 bp, Artificial Sequence
  source: /note="Description of Artificial Sequence: Synthetic probe"
ctcttgttggctcttctgatttatg

SEQ ID NO: 1339 - DNA, 25 bp, Artificial Sequence
  source: /note="Description of Artificial Sequence: Synthetic probe"
gatttatgcacagatggttcccagc

SEQ ID NO: 1340 - DNA, 25 bp, Artificial Sequence
  source: /note="Description of Artificial Sequence: Synthetic probe"
cccagcatgtgtccagtgcttcatg

SEQ ID NO: 1341 - DNA, 25 bp, Artificial Sequence
  source: /note="Description of Artificial Sequence: Synthetic probe"
actaatcagacttcctgccagtgtc

SEQ ID NO: 1342 - DNA, 25 bp, Artificial Sequence
  source: /note="Description of Artificial Sequence: Synthetic probe"
ggcaccctgttcaaccatatttaaa

SEQ ID NO: 1343 - DNA, 25 bp, Artificial Sequence
  source: /note="Description of Artificial Sequence: Synthetic probe"
caccaagacgactgcttcagcttct

SEQ ID NO: 1344 - DNA, 25 bp, Artificial Sequence
  source: /note="Description of Artificial Sequence: Synthetic probe"
tctcttatccttactttctttaata

SEQ ID NO: 1345 - DNA, 25 bp, Artificial Sequence
  source: /note="Description of Artificial Sequence: Synthetic probe"
aaaggtgccacaatgcccagtattg

SEQ ID NO: 1346 - DNA, 25 bp, Artificial Sequence
  source: /note="Description of Artificial Sequence: Synthetic probe"
agctttcattcattctggagtctac

SEQ ID NO: 1347 - DNA, 25 bp, Artificial Sequence
  source: /note="Description of Artificial Sequence: Synthetic probe"
attctgtgaaatgcctctccacgtt

SEQ ID NO: 1348 - DNA, 25 bp, Artificial Sequence
  source: /note="Description of Artificial Sequence: Synthetic probe"
tctccacgttgcatatgtcacactt

SEQ ID NO: 1349 - DNA, 25 bp, Artificial Sequence
  source: /note="Description of Artificial Sequence: Synthetic probe"
gtctgcacataactcttttttcaca

SEQ ID NO: 1350 - DNA, 25 bp, Artificial Sequence
  source: /note="Description of Artificial Sequence: Synthetic probe"
gccacaacagcacagtcagcgggtg

SEQ ID NO: 1351 - DNA, 25 bp, Artificial Sequence
  source: /note="Description of Artificial Sequence: Synthetic probe"
gtcagcgggtgaattacaggtgcct

SEQ ID NO: 1352 - DNA, 25 bp, Artificial Sequence
  source: /note="Description of Artificial Sequence: Synthetic probe"
gtaatctgatcttgtctgtatcgcc

SEQ ID NO: 1353 - DNA, 25 bp, Artificial Sequence
  source: /note="Description of Artificial Sequence: Synthetic probe"
agaattgcaggccactcatgtcagt

SEQ ID NO: 1354 - DNA, 25 bp, Artificial Sequence
  source: /note="Description of Artificial Sequence: Synthetic probe"
gacccgcacacggagaagctggcgc

SEQ ID NO: 1355 - DNA, 25 bp, Artificial Sequence
  source: /note="Description of Artificial Sequence: Synthetic probe"
cactggcggcaggtgtaccgcctct

SEQ ID NO: 1356 - DNA, 25 bp, Artificial Sequence
  source: /note="Description of Artificial Sequence: Synthetic probe"
gccagatcgactacgacttcgtggg

SEQ ID NO: 1357 - DNA, 25 bp, Artificial Sequence
  source: /note="Description of Artificial Sequence: Synthetic probe"
gctggagactctggacgaggacgcc

SEQ ID NO: 1358 - DNA, 25 bp, Artificial Sequence
  source: /note="Description of Artificial Sequence: Synthetic probe"
ggaggaggactggttcgccaagatc

SEQ ID NO: 1359 - DNA, 25 bp, Artificial Sequence
  source: /note="Description of Artificial Sequence: Synthetic probe"
taaactctacgaggccgactttgtt

SEQ ID NO: 1360 - DNA, 25 bp, Artificial Sequence
  source: /note="Description of Artificial Sequence: Synthetic probe"
gaaaacctcctccgagactgaaagc

SEQ ID NO: 1361 - DNA, 25 bp, Artificial Sequence
  source: /note="Description of Artificial Sequence: Synthetic probe"
aaagctttcgcgttgctttttctcg

SEQ ID NO: 1362 - DNA, 25 bp, Artificial Sequence
  source: /note="Description of Artificial Sequence: Synthetic probe"
gcgtgcctggaacctgacgcacgcg

SEQ ID NO: 1363 - DNA, 25 bp, Artificial Sequence
  source: /note="Description of Artificial Sequence: Synthetic probe"
tttgcaatctgggcttcttgttcac

SEQ ID NO: 1364 - DNA, 25 bp, Artificial Sequence
  source: /note="Description of Artificial Sequence: Synthetic probe"
tccactgcctctatccattgagtac

SEQ ID NO: 1365 - DNA, 25 bp, Artificial Sequence
  source: /note="Description of Artificial Sequence: Synthetic probe"
actggactggctgaaggacgacctc

SEQ ID NO: 1366 - DNA, 25 bp, Artificial Sequence
  source: /note="Description of Artificial Sequence: Synthetic probe"
aatttctgacctgtacgatcacacc

SEQ ID NO: 1367 - DNA, 25 bp, Artificial Sequence
  source: /note="Description of Artificial Sequence: Synthetic probe"
accatcctgtttgcagccgaagtgt

SEQ ID NO: 1368 - DNA, 25 bp, Artificial Sequence
  source: /note="Description of Artificial Sequence: Synthetic probe"
tacgacgacgacttgactgatgctg

SEQ ID NO: 1369 - DNA, 25 bp, Artificial Sequence
  source: /note="Description of Artificial Sequence: Synthetic probe"
tgctgtgtttaaaacgctctcccga

SEQ ID NO: 1370 - DNA, 25 bp, Artificial Sequence
  source: /note="Description of Artificial Sequence: Synthetic probe"
cctgcacagccatactgtcggtgga

SEQ ID NO: 1371 - DNA, 25 bp, Artificial Sequence
  source: /note="Description of Artificial Sequence: Synthetic probe"
atgtgaagcctacgatcacttccgc

SEQ ID NO: 1372 - DNA, 25 bp, Artificial Sequence
  source: /note="Description of Artificial Sequence: Synthetic probe"
gctcacagatggcaagctgcgcttc

SEQ ID NO: 1373 - DNA, 25 bp, Artificial Sequence
  source: /note="Description of Artificial Sequence: Synthetic probe"
tcccacagctcctggtttacgagcg

SEQ ID NO: 1374 - DNA, 25 bp, Artificial Sequence
  source: /note="Description of Artificial Sequence: Synthetic probe"
cagaaccagtaacatgacccatcgc

SEQ ID NO: 1375 - DNA, 25 bp, Artificial Sequence
  source: /note="Description of Artificial Sequence: Synthetic probe"
cggcgtctcgactgttcttagagtg

SEQ ID NO: 1376 - DNA, 25 bp, Artificial Sequence
  source: /note="Description of Artificial Sequence: Synthetic probe"
ctcctgggccacaagggctactaga

SEQ ID NO: 1377 - DNA, 25 bp, Artificial Sequence
  source: /note="Description of Artificial Sequence: Synthetic probe"
cagagcctcttatgatatccttgtg

SEQ ID NO: 1378 - DNA, 25 bp, Artificial Sequence
  source: /note="Description of Artificial Sequence: Synthetic probe"
gatgtgggcttgaagccttcccatt

SEQ ID NO: 1379 - DNA, 25 bp, Artificial Sequence
  source: /note="Description of Artificial Sequence: Synthetic probe"
tggtgtacaagaccctttacagccc

SEQ ID NO: 1380 - DNA, 25 bp, Artificial Sequence
  source: /note="Description of Artificial Sequence: Synthetic probe"
tgccctctgccgtgctaaaatatca

SEQ ID NO: 1381 - DNA, 25 bp, Artificial Sequence
  source: /note="Description of Artificial Sequence: Synthetic probe"
ctcttccttgttaccttcaggcaga

SEQ ID NO: 1382 - DNA, 25 bp, Artificial Sequence
  source: /note="Description of Artificial Sequence: Synthetic probe"
agaattagttactctttcctctgtg

SEQ ID NO: 1383 - DNA, 25 bp, Artificial Sequence
  source: /note="Description of Artificial Sequence: Synthetic probe"
gtgcaattgttctatatcttcgctc

SEQ ID NO: 1384 - DNA, 25 bp, Artificial Sequence
  source: /note="Description of Artificial Sequence: Synthetic probe"
ttatgtttaccttccttactagact

SEQ ID NO: 1385 - DNA, 25 bp, Artificial Sequence
  source: /note="Description of Artificial Sequence: Synthetic probe"
gcaggccgtcttaattattcctttc

SEQ ID NO: 1386 - DNA, 25 bp, Artificial Sequence
  source: /note="Description of Artificial Sequence: Synthetic probe"
tagtgtcttttatggttctcagccc

SEQ ID NO: 1387 - DNA, 25 bp, Artificial Sequence
  source: /note="Description of Artificial Sequence: Synthetic probe"
actctttggtctcaacctttaccat

SEQ ID NO: 1388 - DNA, 25 bp, Artificial Sequence
  source: /note="Description of Artificial Sequence: Synthetic probe"
ggattttacgagtctcttgccaagg

SEQ ID NO: 1389 - DNA, 25 bp, Artificial Sequence
  source: /note="Description of Artificial Sequence: Synthetic probe"
ttcaaggtccagactgtctctccaa

SEQ ID NO: 1390 - DNA, 25 bp, Artificial Sequence
  source: /note="Description of Artificial Sequence: Synthetic probe"
tctctccaagagaaccagcttccaa

SEQ ID NO: 1391 - DNA, 25 bp, Artificial Sequence
  source: /note="Description of Artificial Sequence: Synthetic probe"
agtagacttggacgatgcgagcctt

SEQ ID NO: 1392 - DNA, 25 bp, Artificial Sequence
  source: /note="Description of Artificial Sequence: Synthetic probe"
agccttccggtcagtgacgtgtgag

SEQ ID NO: 1393 - DNA, 25 bp, Artificial Sequence
  source: /note="Description of Artificial Sequence: Synthetic probe"
gaggcagaagcgcacggagcctgcc

SEQ ID NO: 1394 - DNA, 25 bp, Artificial Sequence
  source: /note="Description of Artificial Sequence: Synthetic probe"
gttacctttcatgaggcttctagcc

SEQ ID NO: 1395 - DNA, 25 bp, Artificial Sequence
  source: /note="Description of Artificial Sequence: Synthetic probe"
acaacgtctcgaactttctatgtgc

SEQ ID NO: 1396 - DNA, 25 bp, Artificial Sequence
  source: /note="Description of Artificial Sequence: Synthetic probe"
ctctggcgccattgtagcacagcgg

SEQ ID NO: 1397 - DNA, 25 bp, Artificial Sequence
  source: /note="Description of Artificial Sequence: Synthetic probe"
tcagaatccaaacacgctttccgtc

SEQ ID NO: 1398 - DNA, 25 bp, Artificial Sequence
  source: /note="Description of Artificial Sequence: Synthetic probe"
tcttctagattctctctatgttggc

SEQ ID NO: 1399 - DNA, 25 bp, Artificial Sequence
  source: /note="Description of Artificial Sequence: Synthetic probe"
tgttggcagataatctccccttgta

SEQ ID NO: 1400 - DNA, 25 bp, Artificial Sequence
  source: /note="Description of Artificial Sequence: Synthetic probe"
ttccactcacttattcttgcattca

SEQ ID NO: 1401 - DNA, 25 bp, Artificial Sequence
  source: /note="Description of Artificial Sequence: Synthetic probe"
gagtcacaatgatcatcttacccat

SEQ ID NO: 1402 - DNA, 25 bp, Artificial Sequence
  source: /note="Description of Artificial Sequence: Synthetic probe"
gatcaattctttgtttgcagtgggt

SEQ ID NO: 1403 - DNA, 25 bp, Artificial Sequence
  source: /note="Description of Artificial Sequence: Synthetic probe"
aattgtttcttatcatttgttcatt

SEQ ID NO: 1404 - DNA, 25 bp, Artificial Sequence
  source: /note="Description of Artificial Sequence: Synthetic probe"
tgtagaaactctttgacgaacctca

SEQ ID NO: 1405 - DNA, 25 bp, Artificial Sequence
  source: /note="Description of Artificial Sequence: Synthetic probe"
tgatgaatacccagttctcttcttt

SEQ ID NO: 1406 - DNA, 25 bp, Artificial Sequence
  source: /note="Description of Artificial Sequence: Synthetic probe"
gaaagatagttgcaacctcacctcc

SEQ ID NO: 1407 - DNA, 25 bp, Artificial Sequence
  source: /note="Description of Artificial Sequence: Synthetic probe"
ctccctcactcaacactttgaatac

SEQ ID NO: 1408 - DNA, 25 bp, Artificial Sequence
  source: /note="Description of Artificial Sequence: Synthetic probe"
ttgtttggcaggtcatccacacact

SEQ ID NO: 1409 - DNA, 25 bp, Artificial Sequence
  source: /note="Description of Artificial Sequence: Synthetic probe"
ccagctactccggacactgatgtga

SEQ ID NO: 1410 - DNA, 25 bp, Artificial Sequence
  source: /note="Description of Artificial Sequence: Synthetic probe"
gggaggtcatggctacagtgacccc

SEQ ID NO: 1411 - DNA, 25 bp, Artificial Sequence
  source: /note="Description of Artificial Sequence: Synthetic probe"
ttgcaccactttacttagcctgggt

SEQ ID NO: 1412 - DNA, 25 bp, Artificial Sequence
  source: /note="Description of Artificial Sequence: Synthetic probe"
tatgcattgtatgggactttccttt

SEQ ID NO: 1413 - DNA, 25 bp, Artificial Sequence
  source: /note="Description of Artificial Sequence: Synthetic probe"
aagcaatgcgtaagcctgtgtcctt

SEQ ID NO: 1414 - DNA, 25 bp, Artificial Sequence
  source: /note="Description of Artificial Sequence: Synthetic probe"
ttctcgactgcccagatagggaggt

SEQ ID NO: 1415 - DNA, 25 bp, Artificial Sequence
  source: /note="Description of Artificial Sequence: Synthetic probe"
tagggaggtgagtcctctctatctc

SEQ ID NO: 1416 - DNA, 25 bp, Artificial Sequence
  source: /note="Description of Artificial Sequence: Synthetic probe"
aaggacacttgctgggttgtgcatt

SEQ ID NO: 1417 - DNA, 25 bp, Artificial Sequence
  source: /note="Description of Artificial Sequence: Synthetic probe"
ggttgtgcattaagggccagtttac

SEQ ID NO: 1418 - DNA, 25 bp, Artificial Sequence
  source: /note="Description of Artificial Sequence: Synthetic probe"
ttgaccacctgtgaactctgttggg

SEQ ID NO: 1419 - DNA, 25 bp, Artificial Sequence
  source: /note="Description of Artificial Sequence: Synthetic probe"
ctctgttgggtgtactctgctaagt

SEQ ID NO: 1420 - DNA, 25 bp, Artificial Sequence
  source: /note="Description of Artificial Sequence: Synthetic probe"
tttgttcccatttcagggttccaca

SEQ ID NO: 1421 - DNA, 25 bp, Artificial Sequence
  source: /note="Description of Artificial Sequence: Synthetic probe"
tcagggttccacaaactgtcttgca

SEQ ID NO: 1422 - DNA, 25 bp, Artificial Sequence
  source: /note="Description of Artificial Sequence: Synthetic probe"
gccttaacgagactctgtttctggg

SEQ ID NO: 1423 - DNA, 25 bp, Artificial Sequence
  source: /note="Description of Artificial Sequence: Synthetic probe"
tgattttccacttacacatttcttc

SEQ ID NO: 1424 - DNA, 25 bp, Artificial Sequence
  source: /note="Description of Artificial Sequence: Synthetic probe"
ggatgtgctgccaggttgctataga

SEQ ID NO: 1425 - DNA, 25 bp, Artificial Sequence
  source: /note="Description of Artificial Sequence: Synthetic probe"
gcctcttgcaccttgagggggtggg

SEQ ID NO: 1426 - DNA, 25 bp, Artificial Sequence
  source: /note="Description of Artificial Sequence: Synthetic probe"
tgatttcataaccaggccggaccac

SEQ ID NO: 1427 - DNA, 25 bp, Artificial Sequence
  source: /note="Description of Artificial Sequence: Synthetic probe"
actgctccatgccgggttatttaaa

SEQ ID NO: 1428 - DNA, 25 bp, Artificial Sequence
  source: /note="Description of Artificial Sequence: Synthetic probe"
ggcagagtttgtggtggcttttttt

SEQ ID NO: 1429 - DNA, 25 bp, Artificial Sequence
  source: /note="Description of Artificial Sequence: Synthetic probe"
tgtgtttttgtgggggctcgaagca

SEQ ID NO: 1430 - DNA, 25 bp, Artificial Sequence
  source: /note="Description of Artificial Sequence: Synthetic probe"
gctcgaagcagtgactatggcctcc

SEQ ID NO: 1431 - DNA, 25 bp, Artificial Sequence
  source: /note="Description of Artificial Sequence: Synthetic probe"
attgggcctgtcagcccgaatggga

SEQ ID NO: 1432 - DNA, 25 bp, Artificial Sequence
  source: /note="Description of Artificial Sequence: Synthetic probe"
gaaaacttcgatcctttacctgatt

SEQ ID NO: 1433 - DNA, 25 bp, Artificial Sequence
  source: /note="Description of Artificial Sequence: Synthetic probe"
gattattggctatctcttctgttca

SEQ ID NO: 1434 - DNA, 25 bp, Artificial Sequence
  source: /note="Description of Artificial Sequence: Synthetic probe"
agcttcgagtataccttcattgcac

SEQ ID NO: 1435 - DNA, 25 bp, Artificial Sequence
  source: /note="Description of Artificial Sequence: Synthetic probe"
aactctgtatgccataaacctccat

SEQ ID NO: 1436 - DNA, 25 bp, Artificial Sequence
  source: /note="Description of Artificial Sequence: Synthetic probe"
caagtacttgcggttaccctatcct

SEQ ID NO: 1437 - DNA, 25 bp, Artificial Sequence
  source: /note="Description of Artificial Sequence: Synthetic probe"
gacctttgggacctcatggattact

SEQ ID NO: 1438 - DNA, 25 bp, Artificial Sequence
  source: /note="Description of Artificial Sequence: Synthetic probe"
gattactttccaaatctgtccaact

SEQ ID NO: 1439 - DNA, 25 bp, Artificial Sequence
  source: /note="Description of Artificial Sequence: Synthetic probe"
gaagttcactgggcttgccagcttt

SEQ ID NO: 1440 - DNA, 25 bp, Artificial Sequence
  source: /note="Description of Artificial Sequence: Synthetic probe"
gccagctttctcatatagttttttt

SEQ ID NO: 1441 - DNA, 25 bp, Artificial Sequence
  source: /note="Description of Artificial Sequence: Synthetic probe"
tgccaaagttgctgcttgcatctga

SEQ ID NO: 1442 - DNA, 25 bp, Artificial Sequence
  source: /note="Description of Artificial Sequence: Synthetic probe"
acgccaagacagacacgctgcagat

SEQ ID NO: 1443 - DNA, 25 bp, Artificial Sequence
  source: /note="Description of Artificial Sequence: Synthetic probe"
agacacgctgcagatcgaggacttt

SEQ ID NO: 1444 - DNA, 25 bp, Artificial Sequence
  source: /note="Description of Artificial Sequence: Synthetic probe"
acacgctgcagatcgaggactttct

SEQ ID NO: 1445 - DNA, 25 bp, Artificial Sequence
  source: /note="Description of Artificial Sequence: Synthetic probe"
gctgcagatcgaggactttctggag

SEQ ID NO: 1446 - DNA, 25 bp, Artificial Sequence
  source: /note="Description of Artificial Sequence: Synthetic probe"
cgaggactttctggaggagacgctg

SEQ ID NO: 1447 - DNA, 25 bp, Artificial Sequence
  source: /note="Description of Artificial Sequence: Synthetic probe"
gcctcgttacagggagtccaacacc

SEQ ID NO: 1448 - DNA, 25 bp, Artificial Sequence
  source: /note="Description of Artificial Sequence: Synthetic probe"
tcgttacagggagtccaacaccgcc

SEQ ID NO: 1449 - DNA, 25 bp, Artificial Sequence
  source: /note="Description of Artificial Sequence: Synthetic probe"
gcaacgacgttttccacaagttctc

SEQ ID NO: 1450 - DNA, 25 bp, Artificial Sequence
  source: /note="Description of Artificial Sequence: Synthetic probe"
caagttctccgcgttcatcaagaac

SEQ ID NO: 1451 - DNA, 25 bp, Artificial Sequence
  source: /note="Description of Artificial Sequence: Synthetic probe"
ttctccgcgttcatcaagaacccgg

SEQ ID NO: 1452 - DNA, 25 bp, Artificial Sequence
  source: /note="Description of Artificial Sequence: Synthetic probe"
tccgcgttcatcaagaacccggtgc

SEQ ID NO: 1453 - DNA, 25 bp, Artificial Sequence
  source: /note="Description of Artificial Sequence: Synthetic probe"
ttggtaacaaacgccaccttacact

SEQ ID NO: 1454 - DNA, 25 bp, Artificial Sequence
  source: /note="Description of Artificial Sequence: Synthetic probe"
cccaggtctccagacatctagggac

SEQ ID NO: 1455 - DNA, 25 bp, Artificial Sequence
  source: /note="Description of Artificial Sequence: Synthetic probe"
atctagggaccagagcaggtttggg

SEQ ID NO: 1456 - DNA, 25 bp, Artificial Sequence
  source: /note="Description of Artificial Sequence: Synthetic probe"
tgggagtgtagccacagaacccacc

SEQ ID NO: 1457 - DNA, 25 bp, Artificial Sequence
  source: /note="Description of Artificial Sequence: Synthetic probe"
caggcacaccccactgaagagcctg

SEQ ID NO: 1458 - DNA, 25 bp, Artificial Sequence
  source: /note="Description of Artificial Sequence: Synthetic probe"
cccactgaagagcctgagtcccagg

SEQ ID NO: 1459 - DNA, 25 bp, Artificial Sequence
  source: /note="Description of Artificial Sequence: Synthetic probe"
aagccctgccgatcagacatgtggg

SEQ ID NO: 1460 - DNA, 25 bp, Artificial Sequence
  source: /note="Description of Artificial Sequence: Synthetic probe"
cagccagagactgccgtgctgtggg

SEQ ID NO: 1461 - DNA, 25 bp, Artificial Sequence
  source: /note="Description of Artificial Sequence: Synthetic probe"
ctctccgtgtggtcagcgaaaccat

SEQ ID NO: 1462 - DNA, 25 bp, Artificial Sequence
  source: /note="Description of Artificial Sequence: Synthetic probe"
gtcagcgaaaccattgttttctgtt

SEQ ID NO: 1463 - DNA, 25 bp, Artificial Sequence
  source: /note="Description of Artificial Sequence: Synthetic probe"
gttttctgttaggactcagttgcaa

SEQ ID NO: 1464 - DNA, 25 bp, Artificial Sequence
  source: /note="Description of Artificial Sequence: Synthetic probe"
cctccaggccaagaactgctcttgg

SEQ ID NO: 1465 - DNA, 25 bp, Artificial Sequence
  source: /note="Description of Artificial Sequence: Synthetic probe"
tcttgggaagtcgcatatctcccct

SEQ ID NO: 1466 - DNA, 25 bp, Artificial Sequence
  source: /note="Description of Artificial Sequence: Synthetic probe"
tcatcttctgaccctgggttctggg

SEQ ID NO: 1467 - DNA, 25 bp, Artificial Sequence
  source: /note="Description of Artificial Sequence: Synthetic probe"
tgaccctgggttctgggctgtgaag

SEQ ID NO: 1468 - DNA, 25 bp, Artificial Sequence
  source: /note="Description of Artificial Sequence: Synthetic probe"
gtgaaggggacggtgtccccgcacg

SEQ ID NO: 1469 - DNA, 25 bp, Artificial Sequence
  source: /note="Description of Artificial Sequence: Synthetic probe"
gtccccgcacgtttgtattgtgtat

SEQ ID NO: 1470 - DNA, 25 bp, Artificial Sequence
  source: /note="Description of Artificial Sequence: Synthetic probe"
taccccggaaccaagtacgagctgg

SEQ ID NO: 1471 - DNA, 25 bp, Artificial Sequence
  source: /note="Description of Artificial Sequence: Synthetic probe"
gtcgccacctcggaccaagaaggcg

SEQ ID NO: 1472 - DNA, 25 bp, Artificial Sequence
  source: /note="Description of Artificial Sequence: Synthetic probe"
gaccaagaaggcgacagcagctttg

SEQ ID NO: 1473 - DNA, 25 bp, Artificial Sequence
  source: /note="Description of Artificial Sequence: Synthetic probe"
gaaacgcctacgtgtagcagctctg

SEQ ID NO: 1474 - DNA, 25 bp, Artificial Sequence
  source: /note="Description of Artificial Sequence: Synthetic probe"
cttcccactgccccaaggagagggg

SEQ ID NO: 1475 - DNA, 25 bp, Artificial Sequence
  source: /note="Description of Artificial Sequence: Synthetic probe"
gagaagttctacattgaccaggccc

SEQ ID NO: 1476 - DNA, 25 bp, Artificial Sequence
  source: /note="Description of Artificial Sequence: Synthetic probe"
ccccttgttgcctggagtatgacgt

SEQ ID NO: 1477 - DNA, 25 bp, Artificial Sequence
  source: /note="Description of Artificial Sequence: Synthetic probe"
gtgcacatgcgtatgtatttgcttg

SEQ ID NO: 1478 - DNA, 25 bp, Artificial Sequence
  source: /note="Description of Artificial Sequence: Synthetic probe"
ctgctttcctgatcattcgttagag

SEQ ID NO: 1479 - DNA, 25 bp, Artificial Sequence
  source: /note="Description of Artificial Sequence: Synthetic probe"
tgcattgtgttcaaaaacccatttt

SEQ ID NO: 1480 - DNA, 25 bp, Artificial Sequence
  source: /note="Description of Artificial Sequence: Synthetic probe"
gaacagcaagcttttcctgatttta

SEQ ID NO: 1481 - DNA, 25 bp, Artificial Sequence
  source: /note="Description of Artificial Sequence: Synthetic probe"
gtccccaaatgtgtacttagccttc

SEQ ID NO: 1482 - DNA, 25 bp, Artificial Sequence
  source: /note="Description of Artificial Sequence: Synthetic probe"
tacttagccttctgttattccttat

SEQ ID NO: 1483 - DNA, 25 bp, Artificial Sequence
  source: /note="Description of Artificial Sequence: Synthetic probe"
gttattccttattctttaagcagtg

SEQ ID NO: 1484 - DNA, 25 bp, Artificial Sequence
  source: /note="Description of Artificial Sequence: Synthetic probe"
cagtgttggcttccattgaccatat

SEQ ID NO: 1485 - DNA, 25 bp, Artificial Sequence
  source: /note="Description of Artificial Sequence: Synthetic probe"
gaaggccaccaattaaatggttgtg

SEQ ID NO: 1486 - DNA, 25 bp, Artificial Sequence
  source: /note="Description of Artificial Sequence: Synthetic probe"
gcccagggccatggaaggaccctta

SEQ ID NO: 1487 - DNA, 25 bp, Artificial Sequence
  source: /note="Description of Artificial Sequence: Synthetic probe"
aggacccttaggagttcgatgagag

SEQ ID NO: 1488 - DNA, 25 bp, Artificial Sequence
  source: /note="Description of Artificial Sequence: Synthetic probe"
tcatccccttactttaattcttggg

SEQ ID NO: 1489 - DNA, 25 bp, Artificial Sequence
  source: /note="Description of Artificial Sequence: Synthetic probe"
ttcttgggcctccaataagtgtccc

SEQ ID NO: 1490 - DNA, 25 bp, Artificial Sequence
  source: /note="Description of Artificial Sequence: Synthetic probe"
taagtgtcccataggtgtctggcca

SEQ ID NO: 1491 - DNA, 25 bp, Artificial Sequence
  source: /note="Description of Artificial Sequence: Synthetic probe"
gtgcgtgtgtgggcacaggtgtgag

SEQ ID NO: 1492 - DNA, 25 bp, Artificial Sequence
  source: /note="Description of Artificial Sequence: Synthetic probe"
tgtgagtgacagttaccccatttca

SEQ ID NO: 1493 - DNA, 25 bp, Artificial Sequence
  source: /note="Description of Artificial Sequence: Synthetic probe"
gacagttaccccatttcagtcattt

SEQ ID NO: 1494 - DNA, 25 bp, Artificial Sequence
  source: /note="Description of Artificial Sequence: Synthetic probe"
catttcagtcatttcctgctgcaac

SEQ ID NO: 1495 - DNA, 25 bp, Artificial Sequence
  source: /note="Description of Artificial Sequence: Synthetic probe"
gctttgtctctgttgagaatggact

SEQ ID NO: 1496 - DNA, 25 bp, Artificial Sequence
  source: /note="Description of Artificial Sequence: Synthetic probe"
tgagaatggactctacgctcaggca

SEQ ID NO: 1497 - DNA, 25 bp, Artificial Sequence
  source: /note="Description of Artificial Sequence: Synthetic probe"
gattgattgggcttcctcataggaa

SEQ ID NO: 1498 - DNA, 25 bp, Artificial Sequence
  source: /note="Description of Artificial Sequence: Synthetic probe"
gtgtctttgtacttggttcattgcc

SEQ ID NO: 1499 - DNA, 25 bp, Artificial Sequence
  source: /note="Description of Artificial Sequence: Synthetic probe"
tcattgcccttcacctggtagagaa

SEQ ID NO: 1500 - DNA, 25 bp, Artificial Sequence
  source: /note="Description of Artificial Sequence: Synthetic probe"
gtcaccttataacactatttccagt

SEQ ID NO: 1501 - DNA, 25 bp, Artificial Sequence
  source: /note="Description of Artificial Sequence: Synthetic probe"
ctgcggtgttaaggtagccctgcca

SEQ ID NO: 1502 - DNA, 25 bp, Artificial Sequence
  source: /note="Description of Artificial Sequence: Synthetic probe"
tggctctccaggcagggccaagaag

SEQ ID NO: 1503 - DNA, 25 bp, Artificial Sequence
  source: /note="Description of Artificial Sequence: Synthetic probe"
ttggccataagctcatatgctgccc

SEQ ID NO: 1504 - DNA, 25 bp, Artificial Sequence
  source: /note="Description of Artificial Sequence: Synthetic probe"
agactggggagagctgtgtgcctca

SEQ ID NO: 1505 - DNA, 25 bp, Artificial Sequence
  source: /note="Description of Artificial Sequence: Synthetic probe"
gtgtgcctcagtgttgcagtgtgaa

SEQ ID NO: 1506 - DNA, 25 bp, Artificial Sequence
  source: /note="Description of Artificial Sequence: Synthetic probe"
caggaggtgtttggggctctatcgc

SEQ ID NO: 1507 - DNA, 25 bp, Artificial Sequence
  source: /note="Description of Artificial Sequence: Synthetic probe"
gaagccttcagttccaatcagaatc

SEQ ID NO: 1508 - DNA, 25 bp, Artificial Sequence
  source: /note="Description of Artificial Sequence: Synthetic probe"
gatgctgatctctttattctttcaa

SEQ ID NO: 1509 - DNA, 25 bp, Artificial Sequence
  source: /note="Description of Artificial Sequence: Synthetic probe"
aatgctgtcttcctagtccaaacag

SEQ ID NO: 1510 - DNA, 25 bp, Artificial Sequence
  source: /note="Description of Artificial Sequence: Synthetic probe"
agctgcagctttgggcatttttctt

SEQ ID NO: 1511 - DNA, 25 bp, Artificial Sequence
  source: /note="Description of Artificial Sequence: Synthetic probe"
aattattcttcctctgactttgtat

SEQ ID NO: 1512 - DNA, 25 bp, Artificial Sequence
  source: /note="Description of Artificial Sequence: Synthetic probe"
tcctctgactttgtatcccttaata

SEQ ID NO: 1513 - DNA, 25 bp, Artificial Sequence
  source: /note="Description of Artificial Sequence: Synthetic probe"
cttaatacctacactctccaattgt

SEQ ID NO: 1514 - DNA, 25 bp, Artificial Sequence
  source: /note="Description of Artificial Sequence: Synthetic probe"
aaggctgtattcccgttatgaatta

SEQ ID NO: 1515 - DNA, 25 bp, Artificial Sequence
  source: /note="Description of Artificial Sequence: Synthetic probe"
gaacagctgttgcattacatacttt

SEQ ID NO: 1516 - DNA, 25 bp, Artificial Sequence
  source: /note="Description of Artificial Sequence: Synthetic probe"
gatttttctgttctgttgaattgct

SEQ ID NO: 1517 - DNA, 25 bp, Artificial Sequence
  source: /note="Description of Artificial Sequence: Synthetic probe"
gttcaggatgttctagggggtgggg

SEQ ID NO: 1518 - DNA, 25 bp, Artificial Sequence
  source: /note="Description of Artificial Sequence: Synthetic probe"
gggcagggactcttttcgtaataag

SEQ ID NO: 1519 - DNA, 25 bp, Artificial Sequence
  source: /note="Description of Artificial Sequence: Synthetic probe"
tggggtgcgatttccagatcttccc

SEQ ID NO: 1520 - DNA, 25 bp, Artificial Sequence
  source: /note="Description of Artificial Sequence: Synthetic probe"
ttcccgtacaggttaccataccaca

SEQ ID NO: 1521 - DNA, 25 bp, Artificial Sequence
  source: /note="Description of Artificial Sequence: Synthetic probe"
gtgcgactaagcccatcagtgtatc

SEQ ID NO: 1522 - DNA, 25 bp, Artificial Sequence
  source: /note="Description of Artificial Sequence: Synthetic probe"
tatgtcccttatgtcaatgctgttg

SEQ ID NO: 1523 - DNA, 25 bp, Artificial Sequence
  source: /note="Description of Artificial Sequence: Synthetic probe"
gtggagttcatatggcaacgaggcc

SEQ ID NO: 1524 - DNA, 25 bp, Artificial Sequence
  source: /note="Description of Artificial Sequence: Synthetic probe"
gccacatcatcagcacactatgttg

SEQ ID NO: 1525 - DNA, 25 bp, Artificial Sequence
  source: /note="Description of Artificial Sequence: Synthetic probe"
tactggggaccttttgagccttgaa

SEQ ID NO: 1526 - DNA, 25 bp, Artificial Sequence
  source: /note="Description of Artificial Sequence: Synthetic probe"
gagccttgaacttcagcaggccaag

SEQ ID NO: 1527 - DNA, 25 bp, Artificial Sequence
  source: /note="Description of Artificial Sequence: Synthetic probe"
agagcaactcattacttcttcagag

SEQ ID NO: 1528 - DNA, 25 bp, Artificial Sequence
  source: /note="Description of Artificial Sequence: Synthetic probe"
caatgctttggccatgcaacagaag

SEQ ID NO: 1529 - DNA, 25 bp, Artificial Sequence
  source: /note="Description of Artificial Sequence: Synthetic probe"
gaattccctggatgaaggccgtcac

SEQ ID NO: 1530 - DNA, 25 bp, Artificial Sequence
  source: /note="Description of Artificial Sequence: Synthetic probe"
gatgagaaagacctgactgtgcccc

SEQ ID NO: 1531 - DNA, 25 bp, Artificial Sequence
  source: /note="Description of Artificial Sequence: Synthetic probe"
tagaggaaggccactgtctctgcct

SEQ ID NO: 1532 - DNA, 25 bp, Artificial Sequence
  source: /note="Description of Artificial Sequence: Synthetic probe"
gcccctgggaactgaatgtctcggt

SEQ ID NO: 1533 - DNA, 25 bp, Artificial Sequence
  source: /note="Description of Artificial Sequence: Synthetic probe"
gtgggagcgagacatgtttcgagca

SEQ ID NO: 1534 - DNA, 25 bp, Artificial Sequence
  source: /note="Description of Artificial Sequence: Synthetic probe"
agcaatgctgccttgttattcttta

SEQ ID NO: 1535 - DNA, 25 bp, Artificial Sequence
  source: /note="Description of Artificial Sequence: Synthetic probe"
ataaatctggcctacatgcacatcc

SEQ ID NO: 1536 - DNA, 25 bp, Artificial Sequence
  source: /note="Description of Artificial Sequence: Synthetic probe"
agtaccttcccttgaacttaatcat

SEQ ID NO: 1537 - DNA, 25 bp, Artificial Sequence
  source: /note="Description of Artificial Sequence: Synthetic probe"
gacacagattcttttgctcacatgt

SEQ ID NO: 1538 - DNA, 25 bp, Artificial Sequence
  source: /note="Description of Artificial Sequence: Synthetic probe"
gctcacatgttttttgctgaccttc

SEQ ID NO: 1539 - DNA, 25 bp, Artificial Sequence
  source: /note="Description of Artificial Sequence: Synthetic probe"
tcaaaggccggtgccagtgcaggtc

SEQ ID NO: 1540 - DNA, 25 bp, Artificial Sequence
  source: /note="Description of Artificial Sequence: Synthetic probe"
cttggtgtgtcgaatactggtcccc

SEQ ID NO: 1541 - DNA, 25 bp, Artificial Sequence
  source: /note="Description of Artificial Sequence: Synthetic probe"
acttcctgttgtcagttacatccga

SEQ ID NO: 1542 - DNA, 25 bp, Artificial Sequence
  source: /note="Description of Artificial Sequence: Synthetic probe"
ggacactgacatttcactcattcgc

SEQ ID NO: 1543 - DNA, 25 bp, Artificial Sequence
  source: /note="Description of Artificial Sequence: Synthetic probe"
tcactcattcgctattttgtcactg

SEQ ID NO: 1544 - DNA, 25 bp, Artificial Sequence
  source: /note="Description of Artificial Sequence: Synthetic probe"
gtcactgaggtgctggacgtcattg

SEQ ID NO: 1545 - DNA, 25 bp, Artificial Sequence
  source: /note="Description of Artificial Sequence: Synthetic probe"
ttttcctccccatcctggagaatga

SEQ ID NO: 1546 - DNA, 25 bp, Artificial Sequence
  source: /note="Description of Artificial Sequence: Synthetic probe"
gaatgacagcatcgcaggtaccatc

SEQ ID NO: 1547 - DNA, 25 bp, Artificial Sequence
  source: /note="Description of Artificial Sequence: Synthetic probe"
cgagcatgaccctgtgacggagttt

SEQ ID NO: 1548 - DNA, 25 bp, Artificial Sequence
  source: /note="Description of Artificial Sequence: Synthetic probe"
gagcatcctccagagctgaagcaga

SEQ ID NO: 1549 - DNA, 25 bp, Artificial Sequence
  source: /note="Description of Artificial Sequence: Synthetic probe"
gcagaacattccagaacccgttgtg

SEQ ID NO: 1550 - DNA, 25 bp, Artificial Sequence
  source: /note="Description of Artificial Sequence: Synthetic probe"
ttaagaggctcgggcagcgtcttga

SEQ ID NO: 1551 - DNA, 25 bp, Artificial Sequence
  source: /note="Description of Artificial Sequence: Synthetic probe"
tccaagctgacctcagttttctcac

SEQ ID NO: 1552 - DNA, 25 bp, Artificial Sequence
  source: /note="Description of Artificial Sequence: Synthetic probe"
atccaggatttttattcgtcgctta

SEQ ID NO: 1553 - DNA, 25 bp, Artificial Sequence
  source: /note="Description of Artificial Sequence: Synthetic probe"
ttattcgtcgcttattttatgccaa

SEQ ID NO: 1554 - DNA, 25 bp, Artificial Sequence
  source: /note="Description of Artificial Sequence: Synthetic probe"
aatgtgatcaaattatgcctgtttt

SEQ ID NO: 1555 - DNA, 25 bp, Artificial Sequence
  source: /note="Description of Artificial Sequence: Synthetic probe"
actttgtttccaggcttttgctact

SEQ ID NO: 1556 - DNA, 25 bp, Artificial Sequence
  source: /note="Description of Artificial Sequence: Synthetic probe"
atattcttcataaagggaccagcta

SEQ ID NO: 1557 - DNA, 25 bp, Artificial Sequence
  source: /note="Description of Artificial Sequence: Synthetic probe"
acagctgtgctgccattaaggaaag

SEQ ID NO: 1558 - DNA, 25 bp, Artificial Sequence
  source: /note="Description of Artificial Sequence: Synthetic probe"
aaattttctctgaaacctgcagcag

SEQ ID NO: 1559 - DNA, 25 bp, Artificial Sequence
  source: /note="Description of Artificial Sequence: Synthetic probe"
caatgatcactatttttggcctatt

SEQ ID NO: 1560 - DNA, 25 bp, Artificial Sequence
  source: /note="Description of Artificial Sequence: Synthetic probe"
ctccatcatcgacactggtctagcc

SEQ ID NO: 1561 - DNA, 25 bp, Artificial Sequence
  source: /note="Description of Artificial Sequence: Synthetic probe"
tagcctcagagtaacccctgttaac

SEQ ID NO: 1562 - DNA, 25 bp, Artificial Sequence
  source: /note="Description of Artificial Sequence: Synthetic probe"
gtgacttcatgtgatcatatccagg

SEQ ID NO: 1563 - DNA, 25 bp, Artificial Sequence
  source: /note="Description of Artificial Sequence: Synthetic probe"
tcctggcccacgatgaaacctgaga

SEQ ID NO: 1564 - DNA, 25 bp, Artificial Sequence
  source: /note="Description of Artificial Sequence: Synthetic probe"
ctctgccctaactacagtcgtttac

SEQ ID NO: 1565 - DNA, 25 bp, Artificial Sequence
  source: /note="Description of Artificial Sequence: Synthetic probe"
tacagtcgtttacctggtgctgcgt

SEQ ID NO: 1566 - DNA, 25 bp, Artificial Sequence
  source: /note="Description of Artificial Sequence: Synthetic probe"
ggagctttttgcatctagtgggtgg

SEQ ID NO: 1567 - DNA, 25 bp, Artificial Sequence
  source: /note="Description of Artificial Sequence: Synthetic probe"
ggggtcaggtgtgggacatgggagc

SEQ ID NO: 1568 - DNA, 25 bp, Artificial Sequence
  source: /note="Description of Artificial Sequence: Synthetic probe"
aactttcaaccttttcgttggcatg

SEQ ID NO: 1569 - DNA, 25 bp, Artificial Sequence
  source: /note="Description of Artificial Sequence: Synthetic probe"
ggcatgtgtgttaatccctgatcca

SEQ ID NO: 1570 - DNA, 25 bp, Artificial Sequence
  source: /note="Description of Artificial Sequence: Synthetic probe"
cgtatgttataaccatcagcccgcc

SEQ ID NO: 1571 - DNA, 25 bp, Artificial Sequence
  source: /note="Description of Artificial Sequence: Synthetic probe"
gcccgccagggtcagggaaaggact

SEQ ID NO: 1572 - DNA, 25 bp, Artificial Sequence
  source: /note="Description of Artificial Sequence: Synthetic probe"
gaaaggactcacctgactttggaca

SEQ ID NO: 1573 - DNA, 25 bp, Artificial Sequence
  source: /note="Description of Artificial Sequence: Synthetic probe"
gaatggcccacatctcaagaagcaa

SEQ ID NO: 1574 - DNA, 25 bp, Artificial Sequence
  source: /note="Description of Artificial Sequence: Synthetic probe"
agcccaaaggtttgcccgaatggag

SEQ ID NO: 1575 - DNA, 25 bp, Artificial Sequence
  source: /note="Description of Artificial Sequence: Synthetic probe"
gaaacgctcgcgagaggatgctgga

SEQ ID NO: 1576 - DNA, 25 bp, Artificial Sequence
  source: /note="Description of Artificial Sequence: Synthetic probe"
gagggtgctattggtgtcaggaaca

SEQ ID NO: 1577 - DNA, 25 bp, Artificial Sequence
  source: /note="Description of Artificial Sequence: Synthetic probe"
aattgtgtccagaatgtgctcagct

SEQ ID NO: 1578 - DNA, 25 bp, Artificial Sequence
  source: /note="Description of Artificial Sequence: Synthetic probe"
tcagctaattcagtattcttcccca

SEQ ID NO: 1579 - DNA, 25 bp, Artificial Sequence
  source: /note="Description of Artificial Sequence: Synthetic probe"
gttactgttcttcgactttgattcc

SEQ ID NO: 1580 - DNA, 25 bp, Artificial Sequence
  source: /note="Description of Artificial Sequence: Synthetic probe"
gactttgattccttgctcatgacat

SEQ ID NO: 1581 - DNA, 25 bp, Artificial Sequence
  source: /note="Description of Artificial Sequence: Synthetic probe"
catgagtagggtgtgctcttctgtc

SEQ ID NO: 1582 - DNA, 25 bp, Artificial Sequence
  source: /note="Description of Artificial Sequence: Synthetic probe"
ctgtcacttcacacagaccttttgc

SEQ ID NO: 1583 - DNA, 25 bp, Artificial Sequence
  source: /note="Description of Artificial Sequence: Synthetic probe"
gatgatgcccatgacctgtaattgt

SEQ ID NO: 1584 - DNA, 25 bp, Artificial Sequence
  source: /note="Description of Artificial Sequence: Synthetic probe"
atttaaaccatcttggcttgtgctt

SEQ ID NO: 1585 - DNA, 25 bp, Artificial Sequence
  source: /note="Description of Artificial Sequence: Synthetic probe"
ttctcacttttcatccaggaagccg

SEQ ID NO: 1586 - DNA, 25 bp, Artificial Sequence
  source: /note="Description of Artificial Sequence: Synthetic probe"
aagagcaagaatcctcctgcaggct

SEQ ID NO: 1587 - DNA, 25 bp, Artificial Sequence
  source: /note="Description of Artificial Sequence: Synthetic probe"
gagctacacaccatttctggacttc

SEQ ID NO: 1588 - DNA, 25 bp, Artificial Sequence
  source: /note="Description of Artificial Sequence: Synthetic probe"
ggatcagcaaaactgtcagctccca

SEQ ID NO: 1589 - DNA, 25 bp, Artificial Sequence
  source: /note="Description of Artificial Sequence: Synthetic probe"
atcctcactctgagtcttggtatcc

SEQ ID NO: 1590 - DNA, 25 bp, Artificial Sequence
  source: /note="Description of Artificial Sequence: Synthetic probe"
ggtgtctgagatttggatccctggt

SEQ ID NO: 1591 - DNA, 25 bp, Artificial Sequence
  source: /note="Description of Artificial Sequence: Synthetic probe"
gacaccatgctcacagaactgggct

SEQ ID NO: 1592 - DNA, 25 bp, Artificial Sequence
  source: /note="Description of Artificial Sequence: Synthetic probe"
ggctcagagctccattttttgcaga

SEQ ID NO: 1593 - DNA, 25 bp, Artificial Sequence
  source: /note="Description of Artificial Sequence: Synthetic probe"
tggttagaagctgctgcaactgccc

SEQ ID NO: 1594 - DNA, 25 bp, Artificial Sequence
  source: /note="Description of Artificial Sequence: Synthetic probe"
tttgtggtcgaaaggctcagcctct

SEQ ID NO: 1595 - DNA, 25 bp, Artificial Sequence
  source: /note="Description of Artificial Sequence: Synthetic probe"
gctcagcctctctacatgaagtctg

SEQ ID NO: 1596 - DNA, 25 bp, Artificial Sequence
  source: /note="Description of Artificial Sequence: Synthetic probe"
tgataactccctgagcctcaagaca

SEQ ID NO: 1597 - DNA, 25 bp, Artificial Sequence
  source: /note="Description of Artificial Sequence: Synthetic probe"
agacaccttccgagtgtgtgctcta

SEQ ID NO: 1598 - DNA, 25 bp, Artificial Sequence
  source: /note="Description of Artificial Sequence: Synthetic probe"
gaatggcggcagtggagcatcgtca

SEQ ID NO: 1599 - DNA, 25 bp, Artificial Sequence
  source: /note="Description of Artificial Sequence: Synthetic probe"
ccttccaccctcagcggatgataat

SEQ ID NO: 1600 - DNA, 25 bp, Artificial Sequence
  source: /note="Description of Artificial Sequence: Synthetic probe"
tgataatctcaagacacctcccgag

SEQ ID NO: 1601 - DNA, 25 bp, Artificial Sequence
  source: /note="Description of Artificial Sequence: Synthetic probe"
agctctaccctcagcggatgataat

SEQ ID NO: 1602 - DNA, 25 bp, Artificial Sequence
  source: /note="Description of Artificial Sequence: Synthetic probe"
taatctcaagacacctgccgagtgc

SEQ ID NO: 1603 - DNA, 25 bp, Artificial Sequence
  source: /note="Description of Artificial Sequence: Synthetic probe"
gatgataatctcaagacacctcccg

SEQ ID NO: 1604 - DNA, 25 bp, Artificial Sequence
  source: /note="Description of Artificial Sequence: Synthetic probe"
catcgtcattcttcaggattgccct

SEQ ID NO: 1605 - DNA, 25 bp, Artificial Sequence
  source: /note="Description of Artificial Sequence: Synthetic probe"
gctccaccctcagcggatgataatc

SEQ ID NO: 1606 - DNA, 25 bp, Artificial Sequence
  source: /note="Description of Artificial Sequence: Synthetic probe"
gacacctcctgagtgtgtctgctca

SEQ ID NO: 1607 - DNA, 25 bp, Artificial Sequence
  source: /note="Description of Artificial Sequence: Synthetic probe"
ctggatgcgctggagaacctgaccg

SEQ ID NO: 1608 - DNA, 25 bp, Artificial Sequence
  source: /note="Description of Artificial Sequence: Synthetic probe"
ggcctgcactttatagaccagcacc

SEQ ID NO: 1609 - DNA, 25 bp, Artificial Sequence
  source: /note="Description of Artificial Sequence: Synthetic probe"
gcgcttatcgcgagggtcacaaacg

SEQ ID NO: 1610 - DNA, 25 bp, Artificial Sequence
  source: /note="Description of Artificial Sequence: Synthetic probe"
gtcacaaacgttgagtggctgctgg

SEQ ID NO: 1611 - DNA, 25 bp, Artificial Sequence
  source: /note="Description of Artificial Sequence: Synthetic probe"
ctgctggatgctctgtacgggaagg

SEQ ID NO: 1612 - DNA, 25 bp, Artificial Sequence
  source: /note="Description of Artificial Sequence: Synthetic probe"
gtacgggaaggtcctgacggatgag

SEQ ID NO: 1613 - DNA, 25 bp, Artificial Sequence
  source: /note="Description of Artificial Sequence: Synthetic probe"
tgagcagtaccaggcagtgcgggcc

SEQ ID NO: 1614 - DNA, 25 bp, Artificial Sequence
  source: /note="Description of Artificial Sequence: Synthetic probe"
tgcggaagctcttcagtttcacacc

SEQ ID NO: 1615 - DNA, 25 bp, Artificial Sequence
  source: /note="Description of Artificial Sequence: Synthetic probe"
ggaactggacctgcaaggacttgct

SEQ ID NO: 1616 - DNA, 25 bp, Artificial Sequence
  source: /note="Description of Artificial Sequence: Synthetic probe"
ctccaggccctaagggagtcccagt

SEQ ID NO: 1617 - DNA, 25 bp, Artificial Sequence
  source: /note="Description of Artificial Sequence: Synthetic probe"
gtcccagtcctacctggtggaggac

SEQ ID NO: 1618 - DNA, 25 bp, Artificial Sequence
  source: /note="Description of Artificial Sequence: Synthetic probe"
tcaataaatgccccaactgctttgt

SEQ ID NO: 1619 - DNA, 25 bp, Artificial Sequence
  source: /note="Description of Artificial Sequence: Synthetic probe"
gcgcagcatggaggactttgtcact

SEQ ID NO: 1620 - DNA, 25 bp, Artificial Sequence
  source: /note="Description of Artificial Sequence: Synthetic probe"
tttgtcacttgggtggactcgtcca

SEQ ID NO: 1621 - DNA, 25 bp, Artificial Sequence
  source: /note="Description of Artificial Sequence: Synthetic probe"
gactcgtccaagatcaagcggcacg

SEQ ID NO: 1622 - DNA, 25 bp, Artificial Sequence
  source: /note="Description of Artificial Sequence: Synthetic probe"
ggagcgcgatgacttcgatctggaa

SEQ ID NO: 1623 - DNA, 25 bp, Artificial Sequence
  source: /note="Description of Artificial Sequence: Synthetic probe"
cccactttgcatggctgtcttttac

SEQ ID NO: 1624 - DNA, 25 bp, Artificial Sequence
  source: /note="Description of Artificial Sequence: Synthetic probe"
gaggcctgatgctggagattctatg

SEQ ID NO: 1625 - DNA, 25 bp, Artificial Sequence
  source: /note="Description of Artificial Sequence: Synthetic probe"
ggtgctctcctcaagggtatcagac

SEQ ID NO: 1626 - DNA, 25 bp, Artificial Sequence
  source: /note="Description of Artificial Sequence: Synthetic probe"
gcatagagccacgggaggtgcgtcc

SEQ ID NO: 1627 - DNA, 25 bp, Artificial Sequence
  source: /note="Description of Artificial Sequence: Synthetic probe"
ctcctggccgtggttaagctgtgta

SEQ ID NO: 1628 - DNA, 25 bp, Artificial Sequence
  source: /note="Description of Artificial Sequence: Synthetic probe"
atctcctcccttgtttaaatgtcaa

SEQ ID NO: 1629 - DNA, 25 bp, Artificial Sequence
  source: /note="Description of Artificial Sequence: Synthetic probe"
tttcagcaccgatggccatgtaaat

SEQ ID NO: 1630 - DNA, 25 bp, Artificial Sequence
  source: /note="Description of Artificial Sequence: Synthetic probe"
gaaatggtttcacttgctctttgac

SEQ ID NO: 1631 - DNA, 25 bp, Artificial Sequence
  source: /note="Description of Artificial Sequence: Synthetic probe"
gaagatggcttttcctggacagcta

SEQ ID NO: 1632 - DNA, 25 bp, Artificial Sequence
  source: /note="Description of Artificial Sequence: Synthetic probe"
tgtaggtcattgcacctatctcagc

SEQ ID NO: 1633 - DNA, 25 bp, Artificial Sequence
  source: /note="Description of Artificial Sequence: Synthetic probe"
ggtgcagtttgcttctacatgatgc

SEQ ID NO: 1634 - DNA, 25 bp, Artificial Sequence
  source: /note="Description of Artificial Sequence: Synthetic probe"
ggctgcgaatgggatcctgatggaa

SEQ ID NO: 1635 - DNA, 25 bp, Artificial Sequence
  source: /note="Description of Artificial Sequence: Synthetic probe"
ccaatgtcgaactcttctttgctgc

SEQ ID NO: 1636 - DNA, 25 bp, Artificial Sequence
  source: /note="Description of Artificial Sequence: Synthetic probe"
cattcctttttcttcacttacaaga

SEQ ID NO: 1637 - DNA, 25 bp, Artificial Sequence
  source: /note="Description of Artificial Sequence: Synthetic probe"
ggtctactttttaatggctttcata

SEQ ID NO: 1638 - DNA, 25 bp, Artificial Sequence
  source: /note="Description of Artificial Sequence: Synthetic probe"
aaggttaccgatcaatgcatttcat

SEQ ID NO: 1639 - DNA, 25 bp, Artificial Sequence
  source: /note="Description of Artificial Sequence: Synthetic probe"
agacctagggctctggagggtgggg

SEQ ID NO: 1640 - DNA, 25 bp, Artificial Sequence
  source: /note="Description of Artificial Sequence: Synthetic probe"
tccttgcagccatgctcctgggcaa

SEQ ID NO: 1641 - DNA, 25 bp, Artificial Sequence
  source: /note="Description of Artificial Sequence: Synthetic probe"
atgctcctgggcaacccaggtctgg

SEQ ID NO: 1642 - DNA, 25 bp, Artificial Sequence
  source: /note="Description of Artificial Sequence: Synthetic probe"
tgctcctgggcaacccaggtctggt

SEQ ID NO: 1643 - DNA, 25 bp, Artificial Sequence
  source: /note="Description of Artificial Sequence: Synthetic probe"
ccacccagagaagtgtttccaatgc

SEQ ID NO: 1644 - DNA, 25 bp, Artificial Sequence
  source: /note="Description of Artificial Sequence: Synthetic probe"
cacccagagaagtgtttccaatgct

SEQ ID NO: 1645 - DNA, 25 bp, Artificial Sequence
  source: /note="Description of Artificial Sequence: Synthetic probe"
gagaagtgtttccaatgctgcgacc

SEQ ID NO: 1646 - DNA, 25 bp, Artificial Sequence
  source: /note="Description of Artificial Sequence: Synthetic probe"
tgtttccaatgctgcgacccgggtg

SEQ ID NO: 1647 - DNA, 25 bp, Artificial Sequence
  source: /note="Description of Artificial Sequence: Synthetic probe"
tccaatgctgcgacccgggtgtgta

SEQ ID NO: 1648 - DNA, 25 bp, Artificial Sequence
  source: /note="Description of Artificial Sequence: Synthetic probe"
cacgatggcgcgacgtctgcagaaa

SEQ ID NO: 1649 - DNA, 25 bp, Artificial Sequence
  source: /note="Description of Artificial Sequence: Synthetic probe"
gcgcgacgtctgcagaaatttcatg

SEQ ID NO: 1650 - DNA, 25 bp, Artificial Sequence
  source: /note="Description of Artificial Sequence: Synthetic probe"
gacgtctgcagaaatttcatgagga

SEQ ID NO: 1651 - DNA, 25 bp, Artificial Sequence
  source: /note="Description of Artificial Sequence: Synthetic probe"
gtatcagtctagagttacccagggc

SEQ ID NO: 1652 - DNA, 25 bp, Artificial Sequence
  source: /note="Description of Artificial Sequence: Synthetic probe"
tgcccagcagatctgtgaggacctc

SEQ ID NO: 1653 - DNA, 25 bp, Artificial Sequence
  source: /note="Description of Artificial Sequence: Synthetic probe"
ataccttctacaggtcccctctgag

SEQ ID NO: 1654 - DNA, 25 bp, Artificial Sequence
  source: /note="Description of Artificial Sequence: Synthetic probe"
gccctctcaccttgtcctgtggaag

SEQ ID NO: 1655 - DNA, 25 bp, Artificial Sequence
  source: /note="Description of Artificial Sequence: Synthetic probe"
accttgtcctgtggaagaagcacag

SEQ ID NO: 1656 - DNA, 25 bp, Artificial Sequence
  source: /note="Description of Artificial Sequence: Synthetic probe"
cctcatctggtggacggctgcctgc

SEQ ID NO: 1657 - DNA, 25 bp, Artificial Sequence
  source: /note="Description of Artificial Sequence: Synthetic probe"
ctcatctggtggacggctgcctgcc

SEQ ID NO: 1658 - DNA, 25 bp, Artificial Sequence
  source: /note="Description of Artificial Sequence: Synthetic probe"
tacttccaccagcacttggcaggct

SEQ ID NO: 1659 - DNA, 25 bp, Artificial Sequence
  source: /note="Description of Artificial Sequence: Synthetic probe"
ccagcacttggcaggctcctagctg

SEQ ID NO: 1660 - DNA, 25 bp, Artificial Sequence
  source: /note="Description of Artificial Sequence: Synthetic probe"
cttggcaggctcctagctgcctgca

SEQ ID NO: 1661 - DNA, 25 bp, Artificial Sequence
  source: /note="Description of Artificial Sequence: Synthetic probe"
tcctggggccctgaggtctgttcct

SEQ ID NO: 1662 - DNA, 25 bp, Artificial Sequence
  source: /note="Description of Artificial Sequence: Synthetic probe"
ccctgaggtctgttcctggggcagc

SEQ ID NO: 1663 - DNA, 25 bp, Artificial Sequence
  source: /note="Description of Artificial Sequence: Synthetic probe"
cccgtgtccccagctgcaaggtggg

SEQ ID NO: 1664 - DNA, 25 bp, Artificial Sequence
  source: /note="Description of Artificial Sequence: Synthetic probe"
tggacgccgagtttctgcctcagaa

SEQ ID NO: 1665 - DNA, 25 bp, Artificial Sequence
  source: /note="Description of Artificial Sequence: Synthetic probe"
gtttctgcctcagaactgtctctcc

SEQ ID NO: 1666 - DNA, 25 bp, Artificial Sequence
  source: /note="Description of Artificial Sequence: Synthetic probe"
cattgtctccgaagcgtatgtgcca

SEQ ID NO: 1667 - DNA, 25 bp, Artificial Sequence
  source: /note="Description of Artificial Sequence: Synthetic probe"
ctccgaagcgtatgtgccaggtttg

SEQ ID NO: 1668 - DNA, 25 bp, Artificial Sequence
  source: /note="Description of Artificial Sequence: Synthetic probe"
ccgaagcgtatgtgccaggtttgag

SEQ ID NO: 1669 - DNA, 25 bp, Artificial Sequence
  source: /note="Description of Artificial Sequence: Synthetic probe"
cgagggtgatgctggctgctcttct

SEQ ID NO: 1670 - DNA, 25 bp, Artificial Sequence
  source: /note="Description of Artificial Sequence: Synthetic probe"
tgatgctggctgctcttctgaacaa

SEQ ID NO: 1671 - DNA, 25 bp, Artificial Sequence
  source: /note="Description of Artificial Sequence: Synthetic probe"
tggctgctcttctgaacaaataaag

SEQ ID NO: 1672 - DNA, 342 bp, Homo sapiens
acaccatgatgaagttcgcctgctttgaacgtactgttgaagcactgtacaagtttgtggttcctaagccccgcagtgaatgttcaaagccagagcagctggttgtaacatttgtagcaggttacatagctggagtcttttgtgcaattgtttctcaccctgctgattctgtggtatctgtgttgaataaagaaaaaggtagcagtgcttctctggtcctcaagagacttggatttaaaggtgtatggaagggactgtttgcccgtatcatcatgattggtaccctgactgcactacagtggtttatctatgactccgtgaaggtctacttcagacttcctc

SEQ ID NO: 1673 - DNA, 452 bp, Homo sapiens
gccccagagaaactgccacatacaccacaaaaaccaaacatgccccaatgaccttagccccattgctccattcactcccaggtgagaattcaggcaaacgtccacaaaggtcacaggcagcgtacatacggttctgttataccccatatattaccccttcatgtcctaaagaagacattttctcttagagattttcattttagtgtatctttaaaaaaaaaatcttgtgttaacttgcctccatctttttcttggggtgagggacaccagggaatgacccttttgtgtctatgatgttgctgttcacagcttttcttgataggcctagtacaatcttgggaacagggttactgtatactgaaggtctgacagtagctcttagactcgcctatcttaggtagtcatgctgtgcattttttttttcattggtgtactgtgtttgatttgtctca

SEQ ID NO: 1674 - DNA, 526 bp, Homo sapiens
cagggaaaagtgaggctcttgggggtggtttgaccctgcttacctgggagcacacttttcccttccccgatgacctgggatggtggccaggccgtgcccttgctgttgctgggcagtgtccttttggaaagggagctgccccaggctttagtgcagctgccaaccctgttaggcctggcctctcgaggcctcttctgatctcaagggtcacaccccctcaaagatcctctcacccatggtagttgctgctcgtggttctgtctgtccgtgcaccgatgcacacaccgcaccccaccactgtactctgaaattggcgagtgagtggagagccagctctgcggagtcatcacgcagccatggttgtgcctgccgttcatggtggtctttcaggttatcttggcaacatgtacattgcttttattttttttcttttttgctttcattgtacagtcagtactataaaatttctcttttgagttttatacctttgtagcattttagatgacattgtgtttgtactttgttg

SEQ ID NO: 1675 - DNA, 478 bp, Homo sapiens
aatagacttgtgtcttcaccttgctgcattgtgaccagcacctacggctggacagccaatatggagcggatcatgaaagcccaggcacttcgggacaactccaccatgggctatatgatggccaaaaagcacctggagatcaaccctgaccaccccattgtggagacgctgcggcagaaggctgaggccgacaagaatgataaggcagttaaggacctggtggtgctgctgtttgaaaccgccctgctatcttctggcttttcccttgaggatccccagacccactccaaccgcatctatcgcatgatcaagctaggtctaggtattgatgaagatgaagtggcagcagaggaacccaatgctgcagttcctgatgagatcccccctctcgagggcgatgaggatgcgtctcgcatggaagaagtcgattaggttaggagttcatagttggaaaacttgtgcccttgtatagtgtccc

SEQ ID NO: 1676 - DNA, 434 bp, Homo sapiens
cctacttcggtatctatgacactgcaaagggaatgcttccggatcccaagaacactcacatcgtcatcagctggatgatcgcacagactgtcactgctgttgccgggttgacttcctatccatttgacaccgttcgccgccgcatgatgatgcagtcagggcgcaaaggaactgacatcatgtacacaggcacgcttgactgctggcggaagattgctcgtgatgaaggaggcaaagcttttttcaagggtgcatggtccaatgttctcagaggcatgggtggtgcttttgtgcttgtcttgtatgatgaaatcaagaagtacacataagttatttcctaggatttttccccctgtgaacaggcatgttgtattctataacacaatcttgagcattcttgacagactcctggctgtcagtttctcagtggcaac

SEQ ID NO: 1677 - DNA, 543 bp, Homo sapiens
cgtagccctcacgtgggtgtgaaggacgtggagtgtggggaaggacacttctgccatgataaccagacctgctgccgagacaaccgacagggctgggcctgctgtccctaccgccagggcgtctgttgtgctgatcggcgccactgctgtcctgctggcttccgctgcgcagccaggggtaccaagtgtttgcgcagggaggccccgcgctgggacgcccctttgagggacccagccttgagacagctgctgtgagggacagtactgaagactctgcagccctcgggaccccactcggagggtgccctctgctcaggcctccctagcacctccccctaaccaaattctccctggaccccattctgagctccccatcaccatgggaggtggggcctcaatctaaggccttccctgtcagaagggggttgtggcaaaagccacattacaagctgccatcccctccccgtttcagtggaccctgtggccaggtgcttttccctatccacaggggtgtttgtgtgtgtgcgcgtgtgcgtttcaata

SEQ ID NO: 1678 - DNA, 484 bp, Homo sapiens
gccattacagtatccaatgtcttttgacaggtgcctgtccttgaaaaacaaagtttctatttttatttttaattggtttagttcttaactgctggccaactcttacatccccagcaaatcatcgggccattggattttttccattatgttcatcacccttatatcatgtacctcagatctctctctctctcctctctctcagttatatagtttcttgtcttggactttttttttcttttctttttctttttttttttgctttaaaacaagtgtgatgccatatcaagtccatgttattctctcacagtgtactctataagaggtgtgggtgtctgtttggtcaggatgttagaaagtgctgataagtagcatgatcagtgtatgcgaaaaggtttttaggaagtatggcaaaaatgttgtattggctatgatggtgacatgatatagtcagctgccttttaagaggtcttatctgttcagtgtt

SEQ ID NO: 1679 - DNA, 543 bp, Homo sapiens
gtgttctcctactgcaaatattttcatatgggaggatggttttctcttcatgtaagtccttggaattgattctaaggtgatgttcttagcactttaattcctgtcaaattttttgttctccccttctgccatcttaaatgtaagctgaaactggtctactgtgtctctagggttaagccaaaagacaaaaaaaattttactacttttgagattgccccaatgtacagaattatataattctaacgcttaaatcatgtgaaagggttgctgctgtcagccttgcccactgtgacttcaaacccaaggaggaactcttgatcaagatgcccaaccctgtgatcagaacctccaaatactgccatgagaaactagagggcaggtgttcataaaagccctttgaacccccttcctgccctgtgttaggagatagggatattggcccctcactgcagctgccagcacttggtcagtcactctcagccatagcactttgttcactgtcctgtgtcagagcactgagctccacccttttctgagagttat

SEQ ID NO: 1680 - DNA, 508 bp, Homo sapiens
gcagaagatgggcctccagaactcctgtttattcatggaggacacactgctaagatttcagattttagctggaaccccaatgagccttgggtcatttgctcagtgtctgaggataacatcatgcagatatggcaaatggctgaaaatatttacaatgatgaagagtcagatgtcacgacatccgaactggagggacaaggatcttaaacccaaagtacgagaaatgtttctgttgaatgtaatgctacatgaatgcttgatttatcaagcgccaaaaaggcattgtatagtaggaaatgtaagtggggtggcttatggcttctttatcctctgattctagcactttcaagtgagctgttgcgtactgtatcatattgtagctattagggaagagaagaatgttgcttaagaaagaacatcaccattgattttaaatacaagtagcagggtattgcctttgattcaactgttttaagtcctcattttctcaaactaagtgcttgctgtt

SEQ ID NO: 1681 - DNA, 398 bp, Homo sapiens
ctcctggactcaatcatggcttgtggtctggtcgccagcaacctgaatctcaaacctggagagtgccttcgagtgcgaggcgaggtggctcctgacgctaagagcttcgtgctgaacctgggcaaagacagcaacaacctgtgcctgcacttcaaccctcgcttcaacgcccacggcgacgccaacaccatcgtgtgcaacagcaaggacggcggggcctgggggaccgagcagcgggaggctgtctttcccttccagcctggaagtgttgcagaggtgtgcatcaccttcgaccaggccaacctgaccgtcaagctgccagatggatacgaattcaagttccccaaccgcctcaacctggaggccatcaactacatggcagctgacggtgacttcaa

SEQ ID NO: 1682 - DNA, 510 bp, Homo sapiens
acagtcctgcttagagcccttaaaaagacttgaaagttcactgggactcagtttaccttaatgccttagcagaagataaatcctacctagagacctttgttccttaaagcaataactgacaactctttgtagtcctccttgtgggtagttaagagtggggtcacccctttaactccaagcactacattttggcggctgcggcctctgggggaggtggcagttatgctgttactagtgattttagggctttgttatttaacttatttcaagggtgctgtgctcagccctgcccatggctgtgcagctccctccgtgcctcagatctgctgtagccagtgcagacctcactgtcgtgtccatgccacccccggcatggctccaggtggcctggtgactccatgatggacgatcttgctcccaggacctgcctcttcccaggcttcctggggaagagttgtacgcccaggcaacaagggctgagctgcgcttgcgtggctgtttcatgaccgc

SEQ ID NO: 1683 - DNA, 469 bp, Homo sapiens
gagaagttgtagctctgatgtctagctgtagtctccttgatctgctgattgcattattttaatttgcttttctgggaaagcagttttgctaaaagctgtacagactttttcttttgtacctagcagtactttatatagtatagctttgggccatgtagcattttaagactcaattttaaaaaattattaatctgttgctgactcttaattcctatttcaatatgtgtttccttgaagaattcaggatacaacttcttgtgtatgacagctttccttcacacactatttttgtgggtgtgtatatatctgatttgggaagaatttaaaaaacacatagctttttaatttgtttgaaacagactttctgcctgttacatttttgcttttaaccaattaaagaagccaatggcattttagttttatattgtgttttccactagtatatccctgttgatttgtttgtgccttt

SEQ ID NO: 1684 - DNA, 447 bp, Homo sapiens
gagcagtcactctcagaatcttgattccccatcagccaaagcaaaagatggctgctgctttgtaggcatgtgcctgcaagtgggaccttgctgggcattatatgccctgtgggggtttcagagaccctgaaagaggagggaggacccgcctccttgtctgcacaactgcatgcacttctctccccatcgctccacaacctgaaaccgagaaggagttgctgaccagtgcccaccccggcagcccgggaggaacacaggcagctcctttcccttcacgtggtctgcagagagcagggtgagctgccagctgcccctctccaccagggtaccctgtcttggtggttaggggccacttttcctttgaggctctagtggaggtggatgtccttctctgccaggcttggcacatgatgtgaagaataaatgcccaattcttactgttcaggt

SEQ ID NO: 1685 - DNA, 544 bp, Homo sapiens
tggaggcctgcgtgttggatgaacttgacatggagctagccttcctgaccatgtctggcatggcatggaagagtttgaggacatggagagaagtctgccactatgcctgcagctctacgccccagggctgtcgccagaactatcatggagtgtgcaatgggggaccgcggcatgcagctcatgcacgccaacgcccagcggacagatgctctccagccaccgcacgagtatgtgccctgggtcaccgtcaatgggaaacccttggaagatcagacccagctccttacccttgtctgccagttgtaccagggcaagaagccggatgtctgcccttcctcaaccagctccctccggagtgtttgcttcgagtgttggccggtgggctgcggagagctcatggaaggcgagtgggaactcggctgcctgcctttttttctgatccagaccctcggcacctgctacttaccaactggaaaattttatgcatcccatgaagcccagatacacaaaattccacccctagatcaagaatcctgctccacta

SEQ ID NO: 1686 - DNA, 468 bp, Homo sapiens
ttagcgttcatccgtgtaacccgctcatcactggatgaagattctcctgtgctagatgtgcaaatgcaagctagtggcttcaaaatagagaatcccactttctatagcagattgtgtaacaattttaatgctatttccccaggggaaaatgaaggttaggatttaacagtcatttaaaaaaaaaatttgttttgacggatgattggattattcatttaaaatgattagaaggcaagtttctagctagaaatatgattttatttgacaaaatttgttgaaattatgtatgtttacatatcacctcatggcctattatattaaaatatggctataaatatataaaaagaaaagataaagatgatctactcagaaatttttatttttctaaggttctcataggaaaagtacatttaatacagcagtgtcatcagaagataacttgagcaccgtcatggcttaatgtttatt

SEQ ID NO: 1687 - DNA, 459 bp, Homo sapiens
  modified_base (376)..(376): a, c, t, g, unknown or other
aaaacccagataacaaccagagcaaaactgttgtgccttctatttatctttgatttcagtcttggcaattgtttaaaaaaaaaatctagatttgttttattaggttcagagtatgtggggaattatagaatccctctttcatcactttgtgtatgtcttttgttaacatatttgttatgccttattctaaaattgagtctcaaactggaatgcctttgaagacagatgcttctatagaggttctttgacctaaatagttcagcatttgtatttttattctggtatctaatcagattcctaatcatagcccgtaagaaggaatgttactttaatattggactttgctcatgtgctcgtgtccgcatttttttttttncttaaaatcatagccatatggtaaattttctattttgttatggttctcttttattgatgggcatgcagtgggtgttacttgga

SEQ ID NO: 1688 - DNA, 515 bp, Homo sapiens
gcagtgctgctggtatttgccaacaagcaggacatgcccaacgccatgcccgtgagcgagctgactgacaagctggggctacagcacttacgcagccgcacgtggtatgtccaggccacctgtgccacccaaggcacaggtctgtacgatggtctggactggctgtcccacgagctgtcaaagcgctaaccagccaggggcaggcccctgatgcccggaagctcctgcgtgcatccccgggatgaccagactcccggactcctcaggcagtgccctttcctcccacttttcctcccccatagccacaggcctctgctcctgctcctgcctgcatgttctctctgttgttggagcctggagccttgctctctgggcacagaggggtccactctcctgcctgctgggacctatggaaggggcttcctggccaaggccccctcttccagaggaggagcagggatctgggtttccttttttttttctgttttgggtgtactctaggggccaggttggga

SEQ ID NO: 1689 - DNA, 497 bp, Homo sapiens
  modified_base (432)..(432): a, c, t, g, unknown or other
gatttagctcttagttcttcaagtaaaattaaagtctcttgtgtaagagccaacacatgcccagctgcggatgggagctgttcctggacagccttctactgcctgggaagtgatggaacaggaactcagggtgcccttaccccctccccagacctgttccctttctttgactgacagagcaccatccaggcaaaattagagcgccaaatggttttcttctcaatcttaaagcagtatacctttccacaggctcgtctgtgtccctgccactctgagttatccagaaaccaccacctacaaatgaggggactcatctagaagacctctaaggtccccttttggctctgaggggtctctaataatccccacttggaattcagcaccgcaaggaaattatgggtatgtgagccataatatgatggccagcaggtngcgctgccttccacccatggtgatggatggtttggaaagggaatgttggtgccttttgtgccaca

SEQ ID NO: 1690 - DNA, 453 bp, Homo sapiens
gaaaaacagcctgtcggaccacagcctgggcatctcccggagcaaaacccctgtggacgacccgatgagcctgctatacaacatgaacgactgctactccaagctcaaggagctggtgcccagcatcccccagaacaagaaggtgagcaagatggaaatcctgcagcacctcatcgactacatcttggacctgcagatcgccctggactcgcatcccactattgtcagcctgcatcaccagagacccgggcagaaccagcgctccaggacgccgctgaccaccctcaacacggatatcagcatcctgtccttgcaggcttctgaattcccttctgagttaatgtcaaatgacagcaaagcactgtgtggctgaataagcggtgttcatgatttcttttattctttgcacaacaacaacaacaacaaattcacggaatcttttaagtgctgaac

SEQ ID NO: 1691 - DNA, 482 bp, Homo sapiens
acccagagcagcaccgtgtggtgagcgtgcgggagtgtgcccgctcccagggcttccctgacacctaccggctcttcggcaacatcctggacaagcaccggcaggtgggcaatgccgtgccaccgcccctggccaaagccattggcttggagatcaagctttgtatgttggccaaagcccgagagagtgcctcagctaaaataaaggaggaggaagctgctaaggactagttctgccctcccgtcacccctgtttctggcaccaggaatccccaacatgcactgatgttgtgtttttaacatgtcaatctgtccgttcacatgtgtggtacatggtgtttgtggccttggctgacatgaagctgttgtgtgaggttcgcttatcaactaatgatttagtgatcaaattgtgcagtactttgtgcattctggattttaaaagttttttattatgcattatatcaaatctaccactgtatgagt

SEQ ID NO: 1692 - DNA, 546 bp, Homo sapiens
ttgcatttggattggggtccctctaaaatttaatgcatgatagacacatatgagggggaatagtctagatggctcctctcagtactttggaggcccctatgtagtccgtgctgacagctgctcctagagggaggggcctaggcctcagccagagaagctataaattcctctttgctttgctttctgctcagcttctcctgtgtgattgacagctttgctgctgaaggctcattttaatttattaattgctttgagcacaactttaagaggacataatgggggcctggccatccacaagtggtggtaaccctggtggttgctgttttcctcccttctgctactggcaaaaggatctttgtggccaaggagctgctatagcctggggtggggtcatgccctcctctcccattgtccctctgccccatcctccagcagggaaaatgcagcagggatgccctggaggtggctgagcccctgtctagagagggaggcaagccctgttgacacaggtctttcctaaggctgcaaggtttaggctggtggccc

SEQ ID NO: 1693 - DNA, 551 bp, Homo sapiens
ccatccagaatctagcgctgcgcaacacaggaatggagacgcccacaggcgtgtgcgccgcactggcggcggcaggtgtgcagccccacagcctagacctcagccacaactcgctgcgcgccaccgtaaaccctagcgctccgagatgcatgtggtccagcgccctgaactccctcaatctgtcgttcgctgggctggaacaggtgcctaaaggactgccagccaagctcagagtgctcgatctcagctgcaacagactgaacagggcgccgcagcctgacgagctgcccgaggtggataacctgacactggacgggaatcccttcctggtccctggaactgccctcccccacgagggctcaatgaactccggcgtggtcccagcctgtgcacgttcgaccctgtcggtgggggtgtcgggaaccctggtgctgctccaaggggcccggggctttgcctaagatccaagacagaataatgaatggactcaaactgccttggcttcaggggagtcccgtcaggacgttgaggacttttcgaccaattcaacc

SEQ ID NO: 1694 - DNA, 479 bp, Homo sapiens
gatattttacagctggacctagtttcacaatctgttgtctccagctctgcatatgtctggccagggggcttctaggaagtaggtttcatctatcaaatgtctcctctgacttccttttgaaacttactgctcttctgttttattttgttttgtttgaagctcagagggagatgggcaattgacagggatgcaatccagggtgggatttcttgaggaagttacaaataagcttgttacaacatcaagatagatggaattggaaggatgctaccaggagagtacttacatagtgctcaggagtttctcttcttaaaatgtttactgctgaaagatgagcaggaccagggcgttataggcagagccctagccagaaacctgctggcctctgcctgttttcatttcccactttggttgtgtggcattactttcagaattgcactttcctgcttgtcatgactttttgacacacttgccatgac

SEQ ID NO: 1695 - DNA, 537 bp, Homo sapiens
gcttggtctgtttgactttacgcccatctcaggacacttccgtagactgtttaggttcccctgtcaaatatcagttacccactcggtcccagttttgttgccccagaaagggatgttattatccttgggggctcccagggcaagggttaaggcctgaatcatgagcctgctggaagcccagcccctactgctgtgaaccctggggcctgactgctcagaacttgctgctgtcttgttgcggatggatggaaggttggatggatgggtggatggccgtggatggccgtggatgcgcagtgccttgcatacccaaaccaggtgggagcgttttgttgagcatgacacctgcagcaggaatatatgtgtgcctatttgtgtggacaaaaatatttacacttagggtttggagctattcaagaggaaatgtcacagaagcagctaaaccaaggactgagcaccctctggattctgaatctcaagatgggggcagggctgtgcttgaaggccctgctgagtcatctgttagggccttggttc

SEQ ID NO: 1696 - DNA, 452 bp, Homo sapiens
  modified_base (375)..(375): a, c, t, g, unknown or other
ggctgcttaactgctgtataggacaagccccttacccctctctgggcccatgaattcctggcttggtttatgttctgatttgacacactgattttaatcttcgaatcatgacactgagtgcagaggaggtggcattccgacagcaggacatacatgttggtgtgaagactgggacgacactgggtagaatctagtttttaattattattaatataaaggatcaaattaatttaaatatgattctgaagtctacagaacttttagttctgtgctgtctatgtggacactttggtaaaatgcaaattatgatatggacgttatcattggtctggtgagatgtttcatatttgtgacagttaatttaaaaattatganttaatgctgcctgtgtctatggggttctgtcttctttgatagccatctattcatctggatcatgggaccctctctaa

SEQ ID NO: 1697 - DNA, 485 bp, Homo sapiens
ccctcctggacctatttatcctgaaacaccttcttgtattcattaaccatagtactcctccccacctcaagtagacacctctctcaggagcttctgagtcagacgcctctggagcgagccctatgtcaggcactccacctggggggcccttccccagcatacctgctggtgtgtaagtgtggactaacccgccgccaccaccctctgttccagcaggctctgcatgaatctttgtgcacttgcacctctttttcacatgggccacagtttcagtacttcagcctcagtggggttcctgatgtttatctagggtgttactcaagcccagtttgagattttggagtctcctgtgatcacatcttgtctcggctgtaggaatcaacagaaggagacgtcctctacataaaagctccatgtgaaaagctactcctagtcttaacatttgcagtccttgtgtcactgtcttctggtcctgatgtagtccc

SEQ ID NO: 1698 - DNA, 524 bp, Homo sapiens
  modified_base (174)..(174): a, c, t, g, unknown or other
ggctcctacctggtctggaaagagctgggaggcttcacagagaaggctgtggttcccctgggcctctacactgggcagctggccctgaactgggcatggccccccatcttctttggtgcccgacaaatgggctgggccttggtggatctcctgctggtcagtggggcggcggcngccactaccgtggcctggtaccaggtgagcccgctggccgcccgcctgctctacccctacctggcctggctggccttcgcgaccacactcaactactgcgtatggcgggacaaccatggctggcatgggggacggcggctgccagagtgagtgcccggcccaccagggactgcagctgcaccagcaggtgccatcacgcttgtgatgtggtggccgtcacgctttcatgaccactgggcctgctagtctgtcagggccttggcccaggggtcagcagagcttcagaggttgccccacctgagcccccacccgggagcagtgtcctgtgctttctgcatgcttagagcatg

SEQ ID NO: 1699 - DNA, 476 bp, Homo sapiens
aggtttgtcagggtcactctaaagataaaaatgtaactaagtcttctgtgaaatatcatccatctaatcttgatgctgttgcagatggtggtgacacaagttaattgacaaactactgccaaatggtgcacaatattttgtaaaaagtacccagtagccccatttcatacaatgtacctaaattatgcagtaacttggcatcatcgttccctccttgttgctgtgtaattagtcagtgttgccacagtgtgtggcgctgatggagatgtcagaaccgagaacacttaaccttctttgattgtttttcaagttttaagacttcgatccacccctatgagagcaagtaattgtggaaatatttttggtgtaaaatcattccagagtatgtaatatttaactgatagctgcatgaaagtgagattcgtgttactttggcttttctgtctctgttgacacggttgcacatttccaagtta

SEQ ID NO: 1700 - DNA, 531 bp, Homo sapiens
gcatgtccctgaagaggtgctagctgtgttagagcaggaacccattatcctgccagcatgggaccccatgggagctttggctgagtgatactgccctccagctctttcctccttccatggaacctgacgtagctgcaaaggacagatccagggactgaagccaaagttatgcaagggactgtgtgttgccacaggacacagtcagatttccagtctccaccaggaacctcttcagaaagtgtgctttatgctgaaacagaatactgttaaaggaaaaaaaagaggggggaagatcaggtcatactatctactctcctcatctctaacagctcaggatctcttagcattttaattagatgtaattgtttgtctttaactgtcaaaaagtttggttctgtgtctgtgttttaataagacgagaggacgagcgattgaggtgtatggagagaaaacagacctaatgctccttgttcctagagtagagtggagggagggtggcctaagagttgagctctcggaactgcatgctgc

SEQ ID NO: 1701 - DNA, 540 bp, Homo sapiens
tagaacgggcatctactccagtacttcctgccataaaactccagataaagtaaaccatgcagtactggctgttgggtatggagaaaaaaatgggatcccttactggatcgtgaaaaactcttggggtccccagtggggaatgaacgggtacttcctcatcgagcgcggaaagaacatgtgtggcctggctgcctgcgcctcctaccccatccctctggtgtgagccgtggcagccgcagcgcagactggcggagaaggagaggaacgggcagcctgggcctgggtggaaatcctgccctggaggaagttgtggggagatccactgggacccccaacattctgccctcacctctgtgcccagcctggaaacctacagacaaggaggagttccaccatgagctcacccgtgtctatgacgcaaagatcaccagccatgtgccttagtgtccttcttaacagactcaaaccacatggaccacgaatattctttctgtccagaagggctactttccacatatagagctccagggactgtctttt

SEQ ID NO: 1702 - DNA, 463 bp, Homo sapiens
cagccacaaaactgtcattcactctaggggacccctactaaagggtaacttcaggtgtgcagccctgagctccaaggctctgcaccatgccacacacttgctgtaaggctagaagtgaagaccttattaataggagcataattgcgagggagaatcatggttctgcagtctggtgtagacactggaataacagcacagaaaaatctatgactcccaatatcttctagaataaagaattttccctctttaacacaagggccctccttgtcattgaccttagctaaaccatggcaattcataaatagaggaaacattaatgaattaaaagcattccttattttttaactaatatttgtacattttcttagtctctttccaagtctttgcctcttttttttctttatttttattttttcctttgacagatggtatcccttcctggatcattcatttcaccttggtt

SEQ ID NO: 1703 - DNA, 451 bp, Homo sapiens
gttacggcattgccttttctttctgtggatccagtatcttcctcggctttttagggagcaggaaaaatgcgtctgagagcaactctttttaaaaacctgccctgttgtatataactgtgtctgtttcaccgtgtgacctcccaagggggtgggaacttgatataaacgtttaaaggggccacgatttgcccgagggttactcctttgctctcaccttgtatggatgaggagatgaagccatttcttatcctgtagatgtgaagcactttcagttttcagcgatgttggaatgtagcatcagaagctcgttccttcacactcagtggcgtctgtgcttgtccacatgcactgggcgtctgggaccttgaatgcctgccctggttgtgtggactccttaatgccaatcatttcttcacttctctgggacacccagggcgcctgttgacaagtg

SEQ ID NO: 1704 - DNA, 549 bp, Homo sapiens
ccaccaagccacaagagacgtcataatcaaggaaacacaggctccagcatatctcatagacctaatgcatgataagaataatgaaatccgaaaggtctgtgataatacattagatattatagcggaatatgatgaagaatgggctaagaaaattcagagtgaaaagtttcgctggcataactctcagtggctggagatggtagagagtcgtcagatggatgagagtgagcagtacttgtatggtgatgatcgaattgagccatacattcatgaaggagatattctcgaaagacctgaccttttctacaactcagatggattaattgcctctgaaggagccataagtcccgatttcttcaatgattaccaccttcaaaatggagatgttgttgggcagcattcatttcctggcagccttggaatggatggctttggccaaccagttggcattcttggacgccctgccacagcatatggattccgccctgatgaaccttactactatggctatggatcttgataaagtatctgtttccatgtgtaatctca

SEQ ID NO: 1705 - DNA, 353 bp, Homo sapiens
agcaggagcaagaccaggagtcggcagataagagctcaaaaaagatggtccaagaaggctccctagtggacacgctgcaatctagtgacaaagtcgaaagtttaacaggcttttctcatgaagaactagacgactcttggtaaccatgtttgctgcccagcttctaacttacataccgtgagaagttacgtaacatttactcctttgtaaatgtttccctatcatcagacaaaactcaataaaaatgtgtgtaatccaatgtgggtttttttttccataattaattttgataccatagtgtgtgaaccaagaataatctagtcacgtgaaacctcttctccagtcatagtatt

SEQ ID NO: 1706 - DNA, 540 bp, Homo sapiens
aagctaggtcgtgggtcagctctgaggatgtatacccctggtgggagagggagacctagagatctggctgtggggcgggcatggggggtgaagggccactgggaccctcagccttgtttgtactgtatgccttcagcattgcctaggaacacgaagcacgatcagtccatccagagggaccggagttatgacaagcttcccaaatattttgctttatcagccgatatcaacacttgtatctggcctctgtgcccagcagtgccttgtgcaatgtgaatgtaccgtctctgctaaaccaccattttatttggttttgttttgtttggttttctcggatacttgccaaaatgagactctccgtcggcagctgggggaagggtctgagactctctttccttttggttttgggattacttttgatcctgggggaccaatgaggtgaggggggttctcctttgccctcagctttcccagccctccggcctgggctgcccacaaggcttctcccccagaggccctggctcctggtcgggaagggag

SEQ ID NO: 1707 - DNA, 505 bp, Homo sapiens
taccatgaagctctgcgtgactgtcctgtctctcctcatgctagtagctgccttctgctctccagcgctctcagcaccaatgggctcagaccctcccaccgcctgctgcttttcttacaccgcgaggaagcttcctcgcaactttgtggtagattactatgagaccagcagcctctgctcccagccagctgtggtattccaaaccaaaagaagcaagcaagtctgtgctgatcccagtgaatcctgggtccaggagtacgtgtatgacctggaactgaactgagctgctcagagacaggaagtcttcagggaaggtcacctgagcccggatgcttctccatgagacacatctcctccatactcaggactcctctccgcagttcctgtcccttctcttaatttaatcttttttatgtgccgtgttattgtattaggtgtcatttccattatttatattagtttagccaaaggataagtgtcctatggggatggtccactgtcactg

SEQ ID NO: 1708 - DNA, 529 bp, Homo sapiens
gtgacgcaggccctgacaacagttcctgggcccctgtggccccagggacagttgtggttagccgtatcattgtgtgggacatcatggccttcaatggcatcatccatgctctggccagccccctcctggcacccccacagccccaggcagtgctggcgcctgaagccccacctgtggcggcaggcgtgggggctgtgcttgccgctggagcactgcttggcttggtggccggagctctctacctccgtgcccgaggcaagcccacgggctttggcttctctgccttccaggcggaagatgatgctgacgacgacttctcaccgtggcaagaagggaccaaccccaccctggtctctgtccccaaccctgtctttggcagcgacaccttttgtgaacccttcgatgactcactgctggaggaggacttccctgacacccagaggatcctcacagtcaagtgacgaggctggggctgaaagcagaagcatgcacagggaggagaccacttttattgcttgtctgggtggat

SEQ ID NO: 1709 - DNA, 508 bp, Homo sapiens
atccattgtccttgtagtttcttccctcctgttctctggttatagctggtcccaggtcagcgtgggaggcacctttgggttcccagtgcccagcactttgtagtctcatcccagattactaacccttcctgatcctggagaggcagggatagtaaataaattgctcttcctaccccatcccccatcccctgacaaaaagtgacggcagccgtactgagtctgtaaggcccaaagtgggtacagacagcctgggctggtaaaagtaggtccttatttacaaggctgcgttaaagttgtactaggcaaacacactgatgtaggaagcacgaggaaaggaagacgttttgatatagtgttactgtgagcctgtcagtagtgggtaccaatcttttgtgacatattgtcatgctgaggtgtgacacctgctgcactcatctgatgtaaaaccatcccagagctggcgagaggatggagctgggtggaaactgctttgcactatcgtttgctt

SEQ ID NO: 1710 - DNA, 528 bp, Homo sapiens
tgaccttcatggccgtcggaggaggactcgcagtcgccgggctgcccgcgctgggcttcaccggcgccggcatcgcggccaactcggtggctgcctcgctgatgagctggtctgcgatcctgaatgggggcggcgtgcccgccggggggctagtggccacgctgcagagcctcggggctggtggcagcagcgtcgtcataggtaatattggtgccctgatgggctacgccacccacaagtatctcgatagtgaggaggatgaggagtagccagcagctcccagaacctcttcttccttcttggcctaactcttccagttaggatctagaactttgcctttttttttttttttttttttttttgagatgggttctcactatattgtccaggctagagtgcagtggctattcacagatgcgaacatagtacactgcagcctccaactcctagcctcaagtgatcctcctgtctcaacctcccaagtaggattacaagcatgcgccgacgatgcccagaatccagaacttt

SEQ ID NO: 1711 - DNA, 444 bp, Homo sapiens
cagatgcaaaatcaccccttctgcaagaaagcctctttgcaaccgggtcagaatggcggcagtggagcatcgtcattcttcaggattgccctactggccctacctcacagctgaaactttaaaaaacaggatgggccaccagccacctcctccaactcaacaacattctataattgataactccctgagcctcaagacaccttccgagtgtctgctcactccccttccaccctcagctctaccctcagcggatgataatctcaagacacctgcggagtgtctgctctatccccttccaccctcagcggatgataatctcaagacacctcccgagtgtctgctcactccccttccaccctcagctccaccctcagcggatgataatctcaagacacctcccgagtgtgtctgctcactccccttccaccctcagcggatgataat

SEQ ID NO: 1712 - DNA, 221 bp, Homo sapiens
gtggggctgagcaacatttttacatttattccttccaagaagaccatgatctcaatagtcagttactgatgctcctgaaccctatgtgtccatttctgcacacacgtatacctcggcatggccgcgtcacttctctgattatgtgccctggcagggaccagcgcccttgcacatgggcatggttgaatctgaaaccctccttctgtggcaacttgtactga

SEQ ID NO: 1713 - DNA, 432 bp, Homo sapiens
tgtatttcttacaggcctacagaaattgaaaatgaccaaaatcaggaaccacagatttgtgcccattcctaatattttgttctgcaaattaatgtataatttgaggtgaaattcagttataaagtcaaggacgaatttgcacagtgatatatttctatgtgtatgcaagtacaagtatataatatgtcacctggcacattcattttctcagttgaagaagagaaaatttgaaaatgtccttatgcttttagagttgcaacttaagtatatttggtagggtgagtgtttccactcaaaatatgtcaacttaaaaaaaaataggccctttcataaaaaccaaactgtagcaagatgcaaatgcatggcaaatctgtcggtctccagttggttatctgaatagtgtcaccaattccaccaagacagtgctgagat

SEQ ID NO: 1714 - DNA, 545 bp, Homo sapiens
ttggccttcggagcaggaagctaaagctgtttctgaatgagacccaaacgcaggaaattacagaagacatccccgtgaagactttgaatatgaagactgtgtatgtttctgtgttaccaacaacagcagacttctagcatgtacttatcaatgttgttcggtcagcccttccctaattacacctatcccctacacatacatgcacatagacacacacatgaacacactgaagatatttccttcaggtgtgtgtaaaatatgctgcttggattgaaattcaaatgggattgattagtcaagtaacttgagacctcacagtaatcttcacacttaaccttagacacctatgcagtcatgttgggagcaggttacaatgttacttcagcccacagtttatttctattcttgagttcttaagtacagaagatagaagtgatttaaatggcatagtatatatatcattttctggccttttaaaatttatttgagacctcttgatgaaatggacatattatatatttctgccacctggattttcctggata

SEQ ID NO: 1715 - DNA, 342 bp, Homo sapiens
gacttggggagatggagttcttgtgccatagtcacatggcctatgcacatatggactctgcacatgaatcccacccacatgtgacacatatgcaccttgtgtctgtacacgtgtcctgtagttgcgtggactctgcacatgtcttgtgcatgtgtagcctgtgcatgtatgtcttggacactgtacaaggtacccctttctggctctcccatttcctgagaccaccagagagaggggagaagcctgggattgacagaagcttctgcccacctacttttctttcctcagatcatccagaagttcctgaagggccaggactttatctaatacctctgtgtgctc

SEQ ID NO: 1716 - DNA, 481 bp, Homo sapiens
taggccatttggactctgccttcaaacaaaggcagttcagtccacaggcatggaagctgtgaggggacaggcctgtgcgtgccatccagagtcatctcagccctgcctttctctggagcattctgaaaacagatattctggcccagggaatccagccatgacccccacccctctgccaaagtactcttaggtgccagtctggtaactgaactccctctggaggcaggcttgagggaggattcctcagggttcccttgaaagctttatttatttattttgttcatttatttattggagaggcagcattgcacagtgaaagaattctggatatctcaggagccccgaaattctagctctgactttgctgtttccagtggtatgaccttggagaagtcacttatcctcttggagcctcagtttcctcatctgcagaataatgactgacttgtctaattcatagggatgtgaggttctgctgagg

SEQ ID NO: 1717 - DNA, 418 bp, Homo sapiens
gagggcaaccaccagtttgctaagtacaaatcattcaaggtggctgacgaggcagagaagtacaagctggtactgggagcctttgtcgggggcagtgcgggtaattctctaacgggccacaacaacaacttcttctccaccaaagaccaagacaatgatgtgagttcttcgaattgtgctgagaagttccagggagcctggtggtacgccgactgtcatgcttcaaacctcaatggtctctacctcatgggaccccatgagagctatgccaatggtatcaactggagtgcggcgaaggggtacaaatatagctacaaggtgtcagagatgaaggtgcggcccgcctagacgggccaggacccctccacatgcacctgctagtggggaggccacacccacaagcgctgcgtcgtggaag

SEQ ID NO: 1718 - DNA, 442 bp, Homo sapiens
gacaagcgttgagccactaagcagaggaccttgggttcccaatacaaaaatacctactgctgagagggctgctgaccatttggtcaggattcctgttgcctttatatccaaaataaactcccctttcttgaggttgtctgagtcttgggtctatgccttgaaaaaagctgaattattggacagtctcacctcctgccatagggtcctgaatgtttcagaccacaaggggctccacacctttgctgtgtgttctggggcaacctactaatcctctctgcaagtcggtctccttatccccccaaatggaaattgtatttgccttctccactttgggaggctcccacttcttgggagggttacattttttaagtcttaatcatttgtgacatatgtatctatacatccgtatcttttaatgatccgtgtgtaccatctttgtgat

SEQ ID NO: 1719 - DNA, 434 bp, Homo sapiens
aacggccatttgggatgccagggtggatgaaaaggtgaagaaatcaggggattgagacttgggtgggtgggcatctctcaggagccccatctccgggcgtgtcacctcctgggcagggttctgggaccctctgtgggtgacgcacaccctgggatggggctagtagagccttcaggcgccttcgggcgtggactctggcgcactctagtggacaggagaaggaacgccttccaggaacctgtggactaggggtgcagggacttccctttgcaaggggtaacagaccgctggaaaacactgtcactttcagagctcggtggctcacagcgtgtcctgccccggtttgcggacgagagaaatcgcggcccacaagcatcccccatcccttgcaggctgggggctgggcatgctgcatcttaaccttttgtatttat

SEQ ID NO: 1720 - DNA, 438 bp, Homo sapiens
cagccacacgcgaaggtgaccttaaacttttacagctgacggaaaaagcaaaaattaacaaatatgtgactatccttcatctacctaaaaagggggatgatgtgaaaccaggaaccatgtgccaagttgcagggtgggggaggactcacaatagtgcatcttggtccgatactctgagagaagtcaatatcaccatcatagacagaaaagtctgcaatgatcgaaatcactataattttaaccctgtgattggaatgaatatggtttgtgctggaagcctccgaggtggaagagactcgtgcaatggagattctggaagccctttgttgtgcgagggtgttttccgaggggtcacttcctttggccttgaaaataaatgcggagaccctcgtgggcctggtgtctatattcttctctcaaagaaacacctcaactgga

SEQ ID NO: 1721 - DNA, 460 bp, Homo sapiens
aggcaattcagatatccccaaggctgcctctcccaccacaagcccagagtggatgggctgggggaggggtgctgttttaatttctaaaggtaggaccaacacccaggggatcagtgaaggaagagaaggccagcagatcagtgagagtgcaaccccaccctccacaggaaattgcctcatgggcagggccacagcagagagacacagcatgggcagtgccttccctgcctgtgggggtcatgctgccacttttaatgggtcctccacccaacggggtcagggaggtggtgctgccccagtgggccatgattatcttaaaggcattattctccagccttaagatcttaggacgtttcctttgctatgatttgtacttgcttgagtcccatgactgtttctcttcctctctttcttccttttggaatagtaatatccatcctatgtttgtcccactattgta

SEQ ID NO: 1722 - DNA, 428 bp, Homo sapiens
agacctcgagttcagccaaaacctccccatggggcagcagaaaactcattgtccccttcctctaattaaaaaagatagaaactgtctttttcaataaaaagcactgtggatttctgccctcctgatgtgcatatccgtacttccatgaggtgttttctgtgtgcagaacattgtcacctcctgaggctgtgggccacagccacctctgcatcttcgaactcagccatgtggtcaacatctggagtttttggtctcctcagagagctccatcacaccagtaaggagaagcaatataagtgtgattgcaagaatggtagaggaccgagcacagaaatcttagagatttcttgtcccctctcaggtcatgtgtagatgcgataaatcaagtgattggtgtgcctgggtctcactacaagcagcctatctgc

SEQ ID NO: 1723 - DNA, 503 bp, Homo sapiens
agcccctgcccatctgggaaaataccccatcattcatgctactgccaacctggggagccagggctatgggagcagcttttttttcccccctagaaacgtttggaacaatgtaaaactttaaagctcgaaaacaattgtaataatgctaaagaaaaagtcatccaatctaaccacatcaatattgtcattcctgtattcacccgtccagaccttgttcacactctcacatgtttagagttgcaatcgtaatgtacagatggttttataatctgatttgttttcctcttaacgttagaccacaaatagtgctcgctttctatgtagtttggtaattatcattttagaagactctaccagactgtgtattcattgaagtcagatgtggtaactgttaaattgctgtgtatctgatagctctttggcagtctatatgtttgtataatgaatgagagaataagtcatgttccttcaagatcatgtaccccaatttacttgccattact

SEQ ID NO: 1724 - DNA, 543 bp, Homo sapiens
aggtccgagccatcctagaggatctggggctacccctgacctcagatgacgccctgatggtgctagaggtgtgccaggctgtgtcccagagggctgcccagctctgtggggcgggtgtagctgccgtggtggagaagatccgggggaaccggggcctggaagagctggcagtgtctgtgggggtggatggaacgctctacaagctgcacccgcgcttctccagcctggtggcggccacagtgcgggagctggcccctcgctgtgtggtcacgttcctgcagtcagaggatgggtccggcaaaggtgcggccctggtcaccgctgttgcctgccgccttgcgcagttgactcgtgtctgaggaaacctccaggctgaggaggtctccgccgcagccttgctggagccgggtcggggtctgcctgtttcccagccaggcccagccacccaggactcctgggacatcccatgtgtgacccctctgcggccatttggccttgctccctggctttccctgagagaagtagcactcaggttagcaatat

SEQ ID NO: 1725 - DNA, 445 bp, Homo sapiens
gatggattccagccaaccagaaagatcttcaagaagaccccgcaggcagcggaccagtgaaagccgtgatttatgtcacatggcaaatgggattgaagactgtgatgatcagccacctaaagaaaagaaatccaagtcagcaaagaaaaagaaacgctccaaggccaagcaggaaagggaagcttcacctgttgagtttgcaatagatcctaatgaacctacatactgcttatgcaaccaagtgtcttatggggagatgataggatgtgacaatgaacagtgtccaattgaatggtttcacttttcatgtgtttcacttacctataaaccaaaggggaaatggtattgcccaaagtgcaggggagataatgagaaaacaatggacaaaagtactgaaaagacaaaaaaggatagaagatcgaggtagtaaaggccatccacattt

SEQ ID NO: 1726 - DNA, 501 bp, Homo sapiens
gctgacatcctgcgagactacaaagttattatggctgaaaacattcctgaaaaccctctgaagtacctatatcctgacattcccaaagacaaagccttcggtaaacactacagctctcagccttgcgaagtttcaagaccaacagaaaggggtgacaaaggttatgttccttctgtttttatccccatctcaacaatccgaagtgattcaacagagccacattctccatcagaccttcttcccatgtctccaagtgtgtatgcggtgttgagagaaaacctgagtcccacaacaattgaaactgcaatgaagtctccttattctgctgaatgacaggataaactctgacgcaccaagaaaggaagcaaatgaaaaagtttaaagactgttctttgcccaataaccacattttatttcttcagctttgtaaataccaggttctaggaaatgtttgacatctgaagctctcttcacactcccgtggcactcctcaattgggag

SEQ ID NO: 1727 - DNA, 412 bp, Homo sapiens
agtgggcagcaatgacacccaccctaccacagggtcagcctccccgaaacaccagaagaactccaagttacatggccccactgaaacctcaagctgttcaggtgccgcccctactgtggagatggatgaggagctgcattatgcttccctcaactttcatgggatgaatccttccaaggacacctccaccgaatactcagaggtcaggacccagtgaggaaccctcaagagcatcaggctcagctagaagatccacatcctctacaggtcggggaccaaaggctgattcttggagatttaactccccacaggcaatgggtttatagacattatgtgagtttcctgctatattaacatcatcttgagactttgcaagcagagagtcgtggaatcaaatctgtgctctttcatt

SEQ ID NO: 1728 - DNA, 534 bp, Homo sapiens
ggagaacgcacacctggtggtcatcaactcctgggaggagcagaaattcattgtacaacacacgaaccccttcaatacctggataggtctcacggacagtgatggctcttggaaatgggtggatggcacagactataggcacaactacaagaactgggctgtcactcagccagataattggcacgggcacgagctgggtggaagtgaagactgtgttgaagtccagccggatggccgctggaacgatgacttctgcctgcaggtgtaccgctgggtgtgtgagaaaaggcggaatgccaccggcgaggtggcctgaccccagcacacctctggctaacccataccccacacctgcccagctctggcttctctgttgaggattttgaggaaaggaagaaacactgagacaggggtatggggaagagctgagcaaagagagaaaggaggtagtttaagagtccctgaccctggaggactgagatcccacctccttctgtaattcattgtaattattataatcgtcagcctcttcaa

SEQ ID NO: 1729 - DNA, 456 bp, Homo sapiens
gccgagcggaaggggctagactcaagccggctgcccgtcaagtggacggcgcccgaggctctcaaacacgggttcaccagcaagtcggatgtctggagttttggggtgctgctctgggaggtcttctcatatggacgggctccgtaccctaaaatgtcactgaaagaggtgtcggaggccgtggagaaggggtaccgcatggaaccccccgagggctgtccaggccccgtgcacgtcctcatgagcagctgctgggaggcagagccgcccgccggccacccttccgcaaactggccgagaagctggcccgggagctacgcagtgcaggtgccccagcctccgtctcagggcaggacgccgacggtccacctcgccccgaagccaggagccctgaccccacccggtggcccttggccccagaggaccgagagagtggagagtgcggcgtgggggcac

SEQ ID NO: 1730 - DNA, 449 bp, Homo sapiens
aggagcagaaatttgtccagcaccacataggccctgtgaacacctggatgggcctccacgaccaaaacgggccctggaagtgggtggacgggacggactacgagacgggcttcaagaactggaggccggagcagccggacgactggtacggccacgggctcggaggaggcgaggactgtgcccacttcaccgacgacggccgctggaacgacgacgtctgccagaggccctaccgctgggtctgcgagacagagctggacaaggccagccaggagccacctctcctttaatttatttcttcaatgcctcgacctgccgcaggggtccgggattgggaatccgcccatctggggcctcttctgctttctcgggaattttcatctaggattttaagggaaggggaaggatagggtgatgttccgaaggtgaggagcttgaaacccgtggcg

SEQ ID NO: 1731 - DNA, 493 bp, Homo sapiens
tagccccaggaacccttgaggttcttcttcacaaggctgagagtgcttccttcttgaagacgagtgtcattcatcacttcagtgatccatgcatagaatatgaaaataaattcttccaactcatgggataaaggggactcccttgaagaatttcatgtttttgggctgtatagctctttacagaaaatgcacctttataaatcacatgaatgttagtattctggaaatgtcttttgttaatataatcttcccatgttatttaacaaattgtttttgcacatatctgattatattgaaagcagtttttttgcattcgagttttaaacactgttataaaatgtagccaaagctcacctttgaacagatcccggtgacattctatttccaggaaaatccggaacctgattttagttctgtgattttacactttttacatgtgagattggacagtttcagaggccttattttgtcatactaagtgtctcctgtaatt

SEQ ID NO: 1732 - DNA, 534 bp, Homo sapiens
ggaacttccaaatgctgagcccagatccaaagttgtctcctgcccacgagcaccacagtcaggtcttgagggggttttctagggagacaacagccctgtctcaaaaccaggttgccagatccaatgaaccagcagctggaatctgaaggcatcagtctgcatcttaggggatcgctcttcctcacaccacgaatctgaacatgcctctctcttgcttacaaatgcctaaggtcgccactgcctgctgcagagaaaacacactcctttgcttagcccacaaggtatctatttcacttgacccctgcccacctctccaacctaactggcttacttcctagtcctacttgaggctgcaatcacactgaggaactcacaattccaaacatacaagaggctccctcttaacacggcacttacacacttgctgttccaccttccctcatgctgttccacctcccctcagactatctttcagccttctgtcatcagtaaaatttataaattttttttataacttcagtgtagctctctcct

SEQ ID NO: 1733 - DNA, 518 bp, Homo sapiens
caccctgtcctacggaagagctggtccaggcctgtcccaggaggccagaatacaggtggctcccagctgcattctgagaactctgtgattgggcaaggccctcccctgccccaccagcccccacccgcctggagacacaccctcccccacaatctttctagacaggtgcttcaggacagaggacaggcatggcttccccttgggcctcctcagtaggcggtctggcctgacccccaacaaagaagcctggaggtcagagaagcaaatgcggagcctgctccctcctaagaagatcccaagaatccaatggctcagtccttggtgatctaagacagcaaagaagtgtgcaaggagggccctgttagctcccactgtcctggtttctcctcctggagtctaatttccttggccctctgagccttttgagtctgggccctggtccaatgctgctgttgtctgaggaatggtttggtgagaacagatgttagaacttgtttgttgattcttgtctggctaat

SEQ ID NO: 1734 - DNA, 475 bp, Homo sapiens
tcagtgtaatccttgactttgctcctcaccatcagggcaaacttgccttcttccctcctaagctccagtaaataaacagaacagctttcaccaaagtgggtagtatagtcctcaaatatcggataaatatatgcgtttttgtaccccagaaaaacttttcctccctcttcatcaacatagtaaaataagtcaaacaaaatgagaacaccaaattttgggggaataaatttttatttaacactgcaaaggaaagagagagaaaacaagcaaagataggtaggacagaaaggaagacagccagatccagtgattgacttggcatgaaaatgagaaaatgcagacagacctcaacattcaacattcaacaacatccatacagcactgctggaggaagaggaagatttgtgcagaccaagagcaccacagactacaactgcccagcttcatctaaatacttgttaacctctttggtcat

SEQ ID NO: 1735 - DNA, 507 bp, Homo sapiens
ataccaagaaaatgccccaggccttcctgtgggggccgtcgccggcatcgtgaccggggtcctggtcggagtggcgctggtggccgcgctggtgtgtttcctgctccttgccaaaactggaaggccgtggtccctcccacagctctgccttctcgatgtcccctctctccactgcctaggcccccctacccaaccccaggacagcagcttccatctatgagaagtggcttcttagcttcctccaggagctgctcctgtgggttgatggagagtccccaaggcccccagccctggggatggggaaggacatgaagcctgagccagagaaccagctataagtcctgagaagacactggtgtctggggacagggagggatggggtccctgatgaatatctggagacctcgacagcctgccctaggccctgggtgggtcaggacaaaggcctctcatcaccgcagaaagcgggggcttgcagggaaagtgaatgggcctgtggcccacctg

SEQ ID NO: 1736 - DNA, 328 bp, Homo sapiens
gggttcaggccaggtcttttgatggccaggagtagatgacagggagttgccttggggaacctttggtgtgccaagaggaggtgggtagatgggagtggggctcggtcccccaggcccaggggactctctccactctttcctgggctcggggcatctgcctggagttaccttccatcatggctacctgctgtggtttgaatgtttgagtcccaacaaaattcatatcaaaacataatcccaactgggtgcagtggctcacgcctgtaatcccagcactttgggaggccgaggcgggcggatcaataggtcaggaaatccagaccgtcct

SEQ ID NO: 1737 - DNA, 493 bp, Homo sapiens
cccttccaactatgtccagatgtgcaggctcctcctctctggactttctccaaaggcactgaccctcggcctctactttgtcccctcacctccaccccctcctgtcaccggccttgtgacattcactcagagaagaccacaccaaggaggggccgcggctggcccaggagagaacacggggaggtttgtttgtgtgaaaggaaagtagtccaggctgtccctgaaactgagtctgtggacactgtggaaagctttgaacaattgtgttttcgtcacaggagtctttgtaatgcttgtacagttgatgtcgatgctcactgcttctgctttttctttctttttattttaaaaaatctgaaggttctggtaacctgtggtgtatttttattttcctgtgactgtttttgttttgtttttttcctttttcctcccctttagccctattcatgtctctacccactatgcacagattaaacttcacctacaaactcct

SEQ ID NO: 1738 - DNA, 488 bp, Homo sapiens
agaatacaagccactaccttctgacctccccaccccccaccaacccccatcttttaatatgctgtggggcatagaactccggaatgaccagcatgatattttcagagtcttgtccccggggtattagcacctctttttgaacagggaattgattcaagattggacatggtctcctctgattatcaggtactggggctgagggcattaaaaatagtaagcctccctcctcgtcccctgcctcaagaaattgcctccttatttatcaacatctttttcctccctttccctgagagctcacagtacaatgtttcagaagccccatttgcacaggttttcagcaactcagaatgctctacttctttttctttgagaaaggattaagatacactcctgctgtgcccccatctttcctccaaactcctgcctgtgtttgtgtggatacccagtcccagaaccacactgttgagttggacacactgtaaacccct

SEQ ID NO: 1739 - DNA, 484 bp, Homo sapiens
gattggaatgcctggctctactctcctggactgcctcccataaagcccaattatgatatgactctgacaaatgcttgtattgccttaagtcaaagatggattactgccaaagaagatgatttaaattcattcaatgccacagacctgaaggatctctcttctcatcaattgaatgagtttttagcacagacgctccagagggcacctcttccattggggcacataaagcgaatgcaagaggtgtacaacttcaatgccattaacaattctgaaatacgattcagatggctgcggctctgcattcaatccaagtgggaggacgcaattcctttggcgctaaagatggcaactgaacaaggaagaatgaagtttacccggcccttattcaaggatcttgctgcctttgacaaatcccatgatcaagctgtccgaacctaccaagagcacaaagcaagcatgcatcccgtgactgcaatgctggtgg

SEQ ID NO: 1740 - DNA, 485 bp, Homo sapiens
tgccccacctccagaaagtatttgataggtacaagagttacagcccttatgacatgttggaaagcatcaggaaagaggttaaaggagacctggaaaatgctttcctgaacctggtccagcgcattcagaacaagcccttgtattttgctgatcagctgtacgactccatgaagggcaaggggacgcgagataaggtcctgatcagaatcatggtctcccgcagtgaagtggacatgttgaaaattaggtctgaattcaagagaaagtacggcaagtccctgtactactatatccagcaagacactaagggcgactaccagaaagcgctgctgtacctgtgtggtggagctgactgaagcccgacacagcctgagcgtccagaaatggtgctcaccatgcttccagctaacaggtctactaaacatacaaaagtttagccgggcgtggtggcgctcgcctgtagtcccagctagtccggagctgag

SEQ ID NO: 1741 - DNA, 525 bp, Homo sapiens
cgcccagcgtctagactgtagcatcttcctctgagcaataccgccgggcaccgcaccagcaccagccccagccccagctccctccggccgcagaaccagcatcgggtgttcactgtcgagtctcgagtgatttgaaaatgtgccttacgctgccacgctgggggcagctggcctccgcctccgcccacgcaccagcagccgcctccatgccctaggttgggcccctgggggatctgagggcctgtggcccccagggcaagttcccagatcctatgtctgtctgtccaccacgagatgggaggaggagaaaaagcggtacgatgccttcctgacctcaccggcctccccaagggtgccggcactctgggtggactcacggctgctgggccccacgtcaaaggtcaagtgagacgtaggtcaagtcctacgtcggggcccagacatcctggggtcctggtctgtcagacaggctgccctagagccccacccagtccggggggactgggagcagttccaagaccaccc

SEQ ID NO: 1742 - DNA, 495 bp, Homo sapiens
gcactccgtaactcaacatggcatgcctttctctccgtaaactatttagtgagatttttagggactatttttcagtatctctgtacctgttaaagggggtgcttttcgatctaaaaacttaattttataaaattgacttatttttctagactaaaattgtatatgcttttggtaattaggaactcttgagaatattggctgctgattgttgccatcacgttcctacaaaattgtttttctatgggatgttctggcagctgtgtcataaaatgctgctgggttcattcattcattccataagaaacttaataccagcaaatgcattaaatcccttgccagttaccattaactataactatttagcttttgtttagggatctttctgatggtcttttatgagcaatcttagttctaagtcattgttcccatcccttttttgtgtgtttcagaaaatagtgaacttgattcccctgcttccactaaatccagttgtga

SEQ ID NO: 1743 - DNA, 531 bp, Homo sapiens
ggactgcacagttcatggaggctgcagatgaggccttggatgctctggatgctgctgcagctgaggccgaagcccgggctgaagcaagaacccgcatgggaattggagatgaggctgtgtctgggccctggagctgggatgacattgagtttgagctgctgacctgggatgaggaaggagattttggagatccctggtccagaattccatttaccttctgggccagataccaccagaatgcccgctccagattccctcagacctttgccggtcccattattggtcctggtggtacagccagtgccaacttcgctgccaactttggtgccattggtttcttctgggttgagtgagatgttggatattgctatcaatcgcagtagtctttcccctgtgtgagctgaagcctcagattccttctaaacacagctatctagagagccacatcctgttgactgaaagtggcatgcaagataaatttatttgctgttccttgtctactgctttttttccccttgtgtgctgtcaagt

SEQ ID NO: 1744 - DNA, 423 bp, Homo sapiens
gaggaccttgatcttggcgaaagccatcggtgtggcagctttagccctcctccagatcacatgtgtgcaaattatggcttcagagggtggaagataaacagtgacgggggaacaaacagacaacaagaaggtttggaagaaatctggtttgagactctgaaccttagcactaaggagattgagtaaggacctccaaagttccccggactcatgaattctgggcccttggcattcgtgtgcacagccaaggacttcagtagaccatctgggcagctttcccatggtgctgctccaaccatcagataaatgaccctccccaagcaccatgtcagtgtcgtacaatctaccaaccaaccagtgctgaagagattttagaaccttgtaacatacaatttttaagagcttatatggcagcttcctttt

SEQ ID NO: 1745 - DNA, 477 bp, Homo sapiens
ggagaccgatgcttgctcaggatgtcgacagctgtggcttccttgtttttgctagccatatttttaaatcagggttgaactgacaaaaataatttaaagacgtttacttcccttgaactttgaacctgtgaaatgctttaccttgtttacaatttggcaaagttgcagtttgttcttgtttttagtttagttttgttttggtgttttgatacctgtactgtgttcttcacagaccctttgtagcgtggtcaggtctgctgtaacatttcccaccaactctcttgctgtccacatcaacagctaaatcatttattcatatggatctctaccatccccatgccttgcccaggtccagttccatttctctcattcacaagatgctttgaaggttctgattttcaactgatcaaactaatgcaaaaaaaaaaagtatgtattcttcactactgagtttcttctttggaaaccatcactatt

SEQ ID NO: 1746 - DNA, 507 bp, Homo sapiens
aagcgcagatgctagcacatgccctaatgtctgtatcactctgtgtctgagtggcttcactcctgctgtaaatttggcttctgttgtcaccttcacctcctttcaaggtaactgtactgggccatgttgtgcctccctggtgagagggccgggcagaggggcagatggaaaggagcctaggccaggtgcaaccagggagctgcaggggcatgggaaggtgggcgggcaggggagggtcagccagggcctgcgagggcagcgggagcctccctgcctcaggcctctgtgccgcaccattgaactgtaccatgtgctacaggggccagaagatgaacagactgaccttgatgagctgtgcacaaagtggcataaaaaacagtgtggttacacagtgtgaataaagtgctgcggagcaagaggaggccgttgattcacttcacgctttcagcgaatgacaaaatcatctttgtgaaggcctcgcaggaagacgcaacacatgggacctat

SEQ ID NO: 1747 - DNA, 352 bp, Homo sapiens
aatccattcatcctgattgggcatgaaatccatggtcaagaggacaagtggaaagtgagagggaaggtttgctagacaccttcgcttgttatcttgtcaagatagaaaagatagtatcatttcacccttgccagtaaaaacctttccatccacccattctcagcagactccagtattggcacagtcactcactgccattctcacactataacaagaaaagaaatgaagtgcataagtctcctgggaaaagaaccttaaccccttctcgtgccatgactggtgatttcatgactcataagcccctccgtaggcatcattcaagatcaatggcccatgcatgctgtttgcagca

SEQ ID NO: 1748 - DNA, 418 bp, Homo sapiens
ggcccgggtctgcggagagaggccttgtcccagaggctgccccacccctccccattagctttcaattccgtagccagctgctccccagcagcggaaccgcccaggatcagattgcatgtgactctgaagctgacgaacttccatggccctcattaatgacacttgtccccaaatccgaacctcctctgtgaagcattcgagacagaaccttgttatttctcagactttggaaaatgcattgtatcgatgttatgtaaaaggccaaacctctgttcagtgtaaatagttactccagtgccaacaatcctagtgctttccttttttaaaaatgcaaatcctatgtgattttaactctgtcttcacctgattcaactaaaaaaaaaaagtattattttccaaaagtggcctctttgtctaa

SEQ ID NO: 1749 - DNA, 434 bp, Homo sapiens
ccaacactggcgtcagggaaaacacaggacattggcccagagacaggctgatttccaacgtcctccaggggctgccgagccagagcccaaggacgggggcctacagaggaggtccagcccagctgctgacgtccagggagaaaacttctgtgctgccgtgaagaacacacagcctgaggacggggtggaaatggacactcggagcccacacgatgaagacccccaggcagtgacgtatgccaaggtgaaacactccagacctaggagagaaatggcctctcctccctccccactgtctggggaattcctggacacaaaggacagacaggcagaagaggacagacagatggacactgaggctgctgcatctgaagccccccaggatgtgacctacgcccagctgcacagctttaccctcagacagaaggcaactg

SEQ ID NO: 1750 - DNA, 446 bp, Homo sapiens
gccaagcggaccagagctgtgcagcccctcaggctacctagcaacaaggcccaggtgaagccagggcagacatgcagtgtggccggctgggggcagacggcccccctgggaaaacattcacacacactacaagaggtgaagatgacagtgcaggaagatcgaaagtgcgaatctgacttacgccattattacgacagtaccattgagttgtgcgtgggggacccagagattaaaaagacttcctttaagggggactctggaggccctcttgtgtgtaacaaggtggcccagggcattgtctcctatggacgaaacaatggcatgcctccacgagcctgcaccaaagtctcaagctttgtacactggataaagaaaaccatgaaacgctactaactacaggaagcaaactaagcccccgctgtaatgaaacaccttctctggagcca

SEQ ID NO: 1751 - DNA, 530 bp, Homo sapiens
gaaaatgctttcctgaacctggttcagtgcattcagaacaagcccctgtattttgctgatcggctgtatgactccatgaagggcaaggggacgcgagataaggtcctgatcagaatcatggtctcccgcagtgaagtggacatgttgaaaattaggtctgaattcaagagaaagtacggcaagtccctgtactattatatccagcaagacactaagggcgactaccagaaagcgctgctgtacctgtgtggtggagatgactgaagcccgacacggcctgagcgtccagaaatggtgctcaccatgcttccagctaacaggtctagaaaaccagcttgcgaataacagtccccgtggccatccctgtgagggtgacgttagcattacccccaacctcattttagttgcctaagcattgcctggccttcctgtctagtctctcctgtaagccaaagaaatgaacattccaaggagttggaagtgaagtctatgatgtgaaacactttgcctcctgtgtactgtgtcataaa

SEQ ID NO: 1752 - DNA, 144 bp, Homo sapiens
tctgcaccttcatccttaatatgtcacagtttgtgtgatccagcgtcatttccacctgatggggcaactgtgagcattaaacctgaaccagaagatcgagagcctaactttgcaaccattggtctgcaggacatcactttagat

SEQ ID NO: 1753 - DNA, 484 bp, Homo sapiens
gaaagactctgactgctgttcttgccaagaaaaatgggttgggtaccggtgcaactgttacttcatttccagtgaacagaaaacttggaacgaaagtcggcatctctgtgcttctcagaaatccagcctgcttcagcttcaaaacacagatgaactggattttatgagctccagtcaacaattttactggattggactctcttacagtgaggagcacaccgcctggttgtgggagaatggctctgcactctcccagtatctatttccatcatttgaaacttttaatacaaagaactgcatagcgtataatccaaatggaaatgctttagatgaatcctgtgaagataaaaatcgttatatctgtaagcaacagctcatttaaatgtttcttggggcagagaaggtggagagtaaagacccaacattactaacaatgatacagttgcatgttatattattactaattgtctacttctggagtcta

SEQ ID NO: 1754 - DNA, 444 bp, Homo sapiens
ctggaccctatcgtacagaacctgctaaggccatcaaacctattgatcggaagtcagtccatcagatttgctctgggccagtggtactgagtctaagcactgcagtgaaggagttagtagaaaacagtctggatgctggtgccactaatattgatctaaagcttaaggactatggaatggatctcattgaagtttcaggcaatggatgtggggtagaagaagaaaacttcgaaggcttaatgatgtcaccatttctacctgccacgtctcggcgaaggttgggactcgactggtgtttgatcacgatgggaaaatcatccagaagaccccctacccccaccccagagggaccacagtcagcgtgaagcagttattttctacgctacctgtgcgccataaggaatttcaaaggaatattaagaagaaacatgctgcttccccttc

SEQ ID NO: 1755 - DNA, 375 bp, Homo sapiens
aagctatgtgtatcttctgtgtaaagcagtggcttcactggaaaaatggtgtggctagcatttccctttgagtcatgatgacagatggtgtgaaaaccatctaagtttgcttttgaccatcacctcccagtagcaatttgctttcataatccatttagcaatccaggcctctgttgaaaagataatatgagggagaagggaacacatttccttctgaacttacttccctaagtcactttccttatgtatcatctaatacaatgatggttgagtgaaaatacagaaggggtgtttgagtattcagatttcataaaacacttccttggaatatagctgcattaacttggaaagaagcctgttgggccagaagacaga

SEQ ID NO: 1756 - DNA, 495 bp, Homo sapiens
tgggtgaggagacctagcatgccctattggcagtgctcaggagctgcatcccacttttccctgctctgaatcgaagtcctagttccttcctttgattctcctttggtaggtggaatcagttaatgttttgagaaacctgcctgggctctgcccttagtcatgacatctcgctgagccagacccactctgttccttggaacctagagctggagtgaggagtagaggtctccggctattccagaaagaaaagtgagccacatgcaggctgatgaatgccgacacttccagaatgtatagaaatagtccctgtcctggcctgccactgaccctgtctgtattttctcggaggttgtttttctccttctccttcccaggaaggtctttgtatgtcgaatccagtgcactcaagtttggccaagggactccacagcacccagaagactgcatgcctcaaggtttatgtcactcctctgctgggctgttcattgtcattgc

SEQ ID NO: 1757 - DNA, 433 bp, Homo sapiens
  modified_base (109)..(109): a, c, t, g, unknown or other
  modified_base (256)..(256): a, c, t, g, unknown or other
ggatgagcggcgtctgtgtagggacccccccccgggcctgcagaagggtggtgtgctcccaggactggcatgacaggtgtctcctcctcaccacaggctgtgcccatgngtccctgtgcagaccagtgggcaaggcagctgggccagatctcaggccagccgtttgtgctcctagcagggttgctgtgctggccacacggagaggccctagagagcctcatggattgtaactaaagaagaaacggttcctttttgntttttttaaaaatgatttttaaataccgttttttacaccgttctctcggtactttttttaagctaagtcagcattgtcttccagtgttaaaggcatccctcacctctgcattgaacttacgtatccatgccaaggaatggaatttccatcctgagccagttcagttaggtgtcaatt

SEQ ID NO: 1758 - DNA, 372 bp, Homo sapiens
  modified_base (43)..(43): a, c, t, g, unknown or other
tccaaggactgagactgacctcctctggtgacactggcctagngcctgacactctcctaagaggttctctccaagcccccaaatagctccaggcgccctcggccgcccatcatggttaattctgtccaacaaacacacacgggtagattgctggcctgttgtaggtggtagggacacagatgaccgacctggtcactcctcctgccaacattcagtctggtatgtgaggcgtgcgtgaagcaagaactcctggagctacagggacagggagccatcattcctgcctgggaatcctggaagacttcctgcaggagtcagcgttcaatcttgaccttgaagatgggaaggatgttctttttacgtaccaattct

SEQ ID NO: 1759 - DNA, 524 bp, Homo sapiens
  modified_base (152)..(152): a, c, t, g, unknown or other
  modified_base (192)..(192): a, c, t, g, unknown or other
  modified_base (216)..(216): a, c, t, g, unknown or other
  modified_base (261)..(261): a, c, t, g, unknown or other
  modified_base (280)..(280): a, c, t, g, unknown or other
  modified_base (294)..(294): a, c, t, g, unknown or other
  modified_base (323)..(324): a, c, t, g, unknown or other
aaaccatttgtatctggcatcacttactaacacacgacatgcggcttttctgcatcaactgctatgacggttaagaatgtcagtatacaagaaggaatagaaaactgatactgttttaaataatctgtaatttcaatttttttttttttttngctgaaatacattatattgtacgtttgagataattctagntacaaagtataataaaactagatngtataataaaccctttaaatcattggtaagtgtacaagtggtggnaactgaagcatttactggnacaaagtaatgttnactctaatggttacttgctcgtgcgttgnnccacactgtgttataatttgcttcatttccttgctatttgatacatagtgtgcatttctctgtcactgtaactattgtaatgacaaattttcatcttactgcacaatcaaaatgacattgataggaatgaactccagaggctgggcctgaacagggaggtggtcgctcaggcctggtgctcagtcgtacgacctgtacct

SEQ ID NO: 1760 - DNA, 231 bp, Homo sapiens
gtggaaaagcctctaaatgcatcccttcctttctttcctgcttcctttgccttacaattgaagcagcccgtggtaccatcacagtatgcagagacttcctcacctttcatatctagggaccacccccgatgcattggtgagggtgggcacttataaatgcctgctattgttaagccattccagcctcttcctctgaatagaccagacgccctttcacttagttcagtgcca

SEQ ID NO: 1761 - DNA, 401 bp, Homo sapiens
gtatctgcatgaaggctcctgtctgactattccaggatccaatattactgccttctgaaacttcctctttagggtaaccatcatgtatgcccacgagggtgatagtaattcgtgagactgaagttgcttagagtacttctttgaccaaggaataccacagacaccctaccgatagaacagtggctcagatcttacttgctcctgcttacgaagtattcccaatcactggtcatctgaccctacttgaacactcctgaacagtcatgttttttaaaatcttcctttatatcaagtcagagagtatacttctataaatttcactcatggatgttaggaaatctagtcatcttccctgtgattgccctgttaagtatttaaccatagctatcatgtgtttccca

SEQ ID NO: 1762 - DNA, 418 bp, Homo sapiens
  modified_base (223)..(224): a, c, t, g, unknown or other
tcagacacacacaggtcgccagtgacttcacacacacctcatgtgagaaccatgccttttttagtgtgtcctatttcatacctgtacacacttcctcgttttgtaatgagatttacttacacccaaacagatcctgaaagaaagcttcaagttttctcagatgatggatatgttttcactgtattcaataactgacggatgtaaggtgcacgtttcctgatgnntgacgcactgtattccagctggtgatcaagtctgggaacagccgtaacaggtcaaccttgtggagccatcgcgagttagagggtgaaagatggcagaaaaaaaagtcttgtgtgtgagtgtgttttttgagtttgcatcaatcttaatgtctcttcataatacttttataatacattaagcctcttgtctacat

SEQ ID NO: 1763 - DNA, 493 bp, Homo sapiens
ccaggttctgaagcacatgtccggccgcgttggagaagagctggacgagcagggcatcatgctggatgccttcgcccaagagatggaccacacccagtcccgcatggacggggtcctcaggaagttggccaaagtatcccacatgacgagtgaccgccgacagtggtgtgccatcgccgtgctagtgggggtgcttctcctcgttctcatcttactattctctctctgaccccagccctccctggcaggctggtcccttaagcctggggagccaccaagcactttggagctggcctcgccccctaggaggagagggtccctcctgggtagctggagagtagagggtcccgcctggggagctgtccccatggctctcccctagagccagtgggacccttcaggaccctgggctggaaccaccaccactggtcctgtctcaagtgcacttagggggtggtggaggcagggacacctgagacacacctgtctccat

SEQ ID NO: 1764 - DNA, 457 bp, Homo sapiens
  modified_base (76)..(76): a, c, t, g, unknown or other
  modified_base (105)..(105): a, c, t, g, unknown or other
ggatctaccaccatataagagttatgaacaactaaaggaaaaacttctttttgcaatagaagagacagagggattnggacaagaatgaatgtggcttcttatttnggaggagctcttgcatttaaataccccagccaagaaaaattgcacagatagtgtatataagctgttcattctgtacagtgaattttccgaacctctcaaagtatgttttccgttcttccacagaaatatgcaaaacagttcatccttttctactttatttattgttcccttgaaatgactgaccaggaaaaagatcatccttaaattttgaagcaagtgagagactttattaaaaatacatatatatctatataaacatatatgatagtggctctagttttatagagctccaagtgtattaaacatgacagccattcattcataaagatctggatttgctttaccttgttaa

SEQ ID NO: 1765 - DNA, 532 bp, Homo sapiens
  modified_base (96)..(96): a, c, t, g, unknown or other
  modified_base (102)..(102): a, c, t, g, unknown or other
  modified_base (146)..(146): a, c, t, g, unknown or other
tgctgttcatcccacatcgtgtggggcagtgtccatcccctgcagctacttggtgacttaacaactccaggagccctgtcagctgccctcctccanctaaancccttcgactcttctgctttgacaaagaaaatgacattgggganggggaggtgctccgcctcccagcttttctcaaaatagtcctatagatactggtaatctggaaatgaagaagtaattctgtctctgcacctacttttgcagaatgttcaaggaagtattctgtgttagtattaatgccaaaaagttgtttttaaaggttttgtactcagcacatcatacaaaccacattacttctgtcacttcagggcatcgggactggctggcgcccttgttatgtgctattttaatcagtgtaacattggtcaagttgttacccatgtatgctgtgtttatcatgtgtatatcgtccagaaagtattaaggctttaggtagatgcaactggcgaaccttggagagggaatgctgattgtcttgaccaaacccaca

SEQ ID NO: 1766 - DNA, 462 bp, Homo sapiens
  modified_base (304)..(304): a, c, t, g, unknown or other
ggtactatgttagccccataattttttttttccttttaaaacacttccataatctggactcctctgtccaggcactgctgcccagcctccaagctccatctccactccagattttttacagctgcctgcagtactttacctcctatcagaagtttctcagctcccaaggctctgagcaaatgtggctcctgggggttctttcttcctctgctgaaggaataaattgctccttgacattgtagagcttctggcacttggagacttgtatgaaagatggctgtgcctctgcctgtctcccccaccnggctgggagctctgcagagcaggaaacatgactcgtatatgtctcaggtccctgcagggccaagcacctagcctcgctcttggcaggtactcagcgaatgaatgctgtatatgttgggtgcaaagttccctacttcctgtgacttcagctctgtttta

SEQ ID NO: 1767 - DNA, 563 bp, Homo sapiens
ttaccttgcaatcacttctttcacagcagttgtattgtgccgtggctagaactgcatgacacatgtcctgtatgtaggaagagcttaaatggtgaggactctactcggcaaagccagagcactgaggcctctgcaagcaacagatttagcaatgacagtcagctacatgaccgatggactttctgaagctaaagaccacacctgaatcagggctgtggtaatcatcttaccatagctgtaaattgtatcaaaacaaaaaattagtagatggatttaggaatatgtaagaaactcaacacataatataaatgcaatgaatgtttttcttctttaaatttaaagttagtatctacagatggaattgtatctacaaccaaatgcctcttatccctgaattcagagtgataattttataagtgtgaaacttaattatgtagggctccccccgtctgaatagaattaattccttaaagtctagttagggtcctgctgtctgtcatgttgccttgtaacggatgtttccacctccttctccaacctctaccccaccattagtgtatttt

SEQ ID NO: 1768 - DNA, 551 bp, Homo sapiens
taacttggggatggtctcccctgccccagggcacataagagcaaaggctccaatggtcagtggatgactctgcaaaagtgaccccctgtgccagaagctatagccctctccccaacaggtctctcttgttggccagagggcctgcttcccatgggcattgcaagtgccaccgtgcggggcctggctctgcacacccaggaaaagtctgcagacccccagccctccgcaataattcaccagaccagaagccactggtgtacagagaacacttaaaaaaatgtattttatgtgaaaaaaaattaaaactctgtatactgtatcagcagctttgtgtaaaaatggcaatcaagagagtctaatatatttaaaacttttttaaaaaaaatcttcgcagatctttgatatcgtactgaggtaacttccacgtagccccttgccacgcggcaccggtgggccttgggtccaaaactgtggctcagccacatcccaaagggggcacatgtccctggagttgcttccagctgccaaggcctgtgacagaattcgctgtt

SEQ ID NO: 1769 - DNA, 354 bp, Homo sapiens
gaatgtgagagcctgggtgtctgagaccgggagggcccagcagtgaggggcaggctcttctggtcaccaggctgttcagtggactcagttcttcatcttgtaatgtcgatggctttgccacaccaggccaagcccatgccataccttgtcaagactgtcaaagtggttgtggttaggtcaaactggttttggttctgatggttaggaagaaacaggtcagccctcagatcacctggcccgggacagctgaccccctagaaccctggctctgccattagctaggacctaagactctgcccacattttggtctgttctctcccattacacataggtttgtctcagcatgcaagagt

SEQ ID NO: 1770 - DNA, 467 bp, Homo sapiens
  modified_base (68)..(68): a, c, t, g, unknown or other
atttctggtttgaggctgtgggtcccacccactcagctcactcgggcctctggccaacagggcatggngacatcatatcaggctacatccacgtgacgcagaccttcagcattatggctgttctgtgggccctggtgtccgtgagcttcctggtcctgtcctgcttcccctcactgttccccccaggccacggcccgcttgtctcaaccaccgcagcctttgctgcagccatctccatggtggtggccatggcggtgtacaccagcgagcggtgggaccagcctccacacccccagatccagaccttcttctcctggtccttctacctgggctgggtctcagctatcctcttgctctgtacaggtgccctgagcctgggtgctcactgtggcggtccccgtcctggctatgaaaccttgtgagcagaaggcaagagcggcaagatgagttttgagcgttgtattcca

SEQ ID NO: 1771 - DNA, 558 bp, Homo sapiens
  modified_base (126)..(127): a, c, t, g, unknown or other
  modified_base (130)..(130): a, c, t, g, unknown or other
  modified_base (139)..(139): a, c, t, g, unknown or other
  modified_base (144)..(144): a, c, t, g, unknown or other
  modified_base (148)..(148): a, c, t, g, unknown or other
  modified_base (151)..(151): a, c, t, g, unknown or other
  modified_base (168)..(168): a, c, t, g, unknown or other
  modified_base (176)..(177): a, c, t, g, unknown or other
  modified_base (220)..(221): a, c, t, g, unknown or other
  modified_base (251)..(251): a, c, t, g, unknown or other
  modified_base (392)..(392): a, c, t, g, unknown or other
  modified_base (426)..(426): a, c, t, g, unknown or other
gacagacctcaggagggctattggtccaggacccacacctgctttcttcatgtttcctgatcccgccctgggtctgcagtcacacatttctggaaacttctctggggtccaagactaggaggttcnnctnggaccttanggccntggntcntttctggtatctcacanggacattnncttctcacagatagaaaaggagggagttacactcaggctgcanncagtgacagtgcccaggctctgatgtgtcnctcacagcttgtaaagtgtgagacagctgccttgtgtgggactgagaggcaagagttgttcctgcccttccctttgtgacttgaagaaccctgactttgtttctgcaaaggcacctgcatgtgtctgtgttcgtgtaggcntaatgtgaggaggtggggagaccaccccaccccnatgtccaccatgaccctcttcccacgctgacctgtgctccctccccaatcatctttcctgttccagagaggtggggctgaggtgtctccatctctgtctcaacttcatggtgcactgagctgtaacttcttc

SEQ ID NO: 1772 - DNA, 516 bp, Homo sapiens
  modified_base (343)..(343): a, c, t, g, unknown or other
  modified_base (457)..(457): a, c, t, g, unknown or other
gccgaactgtcaccgaacgtacagctgtatccactgcagagcacacctggccaatcatgacgagctcatctccaagtcctttcaggggagccagggacgcgcctacctcttcaattccgtggtgaacgtgggctgcggccctgcagaggagagggtccttctcaccgggctgcatgcggttgccgacatctactgcgagaactgcaagaccacgctcgggtggaaatacgagcatgcctttgagagcagtcagaaatataaggaaggaaaattcatcattgagcttgctcatatgatcaaagacaatggctgggagtaatgtgcgaactttcccttctccttngaatgctgttttgtgaaagaaactgtgaatgtaatggaaacgtaggagcatctggtgacagcctttcttgccctctgacctcaaaggctagctgcgcatagctcttgacactcncggccatctctgtgggtaaggtgtccctcggatctgtcctcttcgtgtacacagttgtt

SEQ ID NO: 1773 - DNA, 588 bp, Homo sapiens
  modified_base (47)..(47): a, c, t, g, unknown or other
  modified_base (63)..(63): a, c, t, g, unknown or other
  modified_base (260)..(260): a, c, t, g, unknown or other
aagggccggaggtcatggccttcatcgagcagggcaagcggatggantgcccaccagagtgtnccacccgaactgtacgcactcatgagtgactgctggatctacaagtgggaggatcgccccgacttcctgaccgtggagcagcgcatgcgagcctgttactacagcctggccagcaaggtggaagggcccccaggcagcacacagaaggctgaggctgcctgtgcctgagctcccgctgcccaggggagccctccacnccggctcttccccaccctcagccccaccccaggtcctgcagtctggctgagccctgcttggttgtctccacacacagctgggctgtggtagggggtgtctcaggccacaccggccttgcattgcctgcctggccccctgtcctctctggctggggagcagggaggtccgggagggtgcggctgtgcagcctgtcctgggctggtggctcccggagggccctgagctgagggcattgcttacacggatgccttcccctgggccctgacattggagcctgggcatcctcaggtggtcaggcgtagatcaccagaataaacccagcttccc

SEQ ID NO: 1774 - DNA, 407 bp, Homo sapiens
caggacttcatcatgctgcagaacaacgagcacagaattgcgcagtacctggccacttatggccccatcaccgtgaccatcaacatgaagccccttcagctataccggaaaggtgtgatcaaggccacacccaccacctgtgacccccagcttgtggaccactctgtcctgctggtgggttttggcagcgtcaagtcagaggaggggatatgggcagagacagtctcatcgcagtctcagcctcagcctccacaccccaccccatactggatcctgaagaactcctggggggcccaatggggagagaagggctatttccggctgcaccgagggagcaatacctgtggcatcaccaagttcccgctcactgcccgtgtgcagaaaccggatatgaagccccgagtctc

SEQ ID NO: 1775 - DNA, 531 bp, Homo sapiens
  modified_base (41)..(41): a, c, t, g, unknown or other
  modified_base (43)..(44): a, c, t, g, unknown or other
  modified_base (114)..(116): a, c, t, g, unknown or other
  modified_base (118)..(125): a, c, t, g, unknown or other
  modified_base (127)..(129): a, c, t, g, unknown or other
  modified_base (273)..(273): a, c, t, g, unknown or other
  modified_base (337)..(337): a, c, t, g, unknown or other
  modified_base (365)..(365): a, c, t, g, unknown or other
  modified_base (396)..(396): a, c, t, g, unknown or other
  modified_base (457)..(457): a, c, t, g, unknown or other
  modified_base (460)..(460): a, c, t, g, unknown or other
  modified_base (468)..(468): a, c, t, g, unknown or other
ccaacgcaaattcgcaaactttcttaaaacattatgagttncnntttgctatttttttttttttttttagctcatcggctatcgttagtgctagtggattttacatgtggcccnnnannnnnnnncnnncaacgtggcccagagaagccaaaagattggatacgcatcagacagatggaaaagggagattcagactgtttttcagggaggtggctgggtttacacgctaatcccgattcaccctgtccaaactgcctaagccctccgccattntcaagccctgcagtcacagctacacagatcacagcttcagccaggagctgggcagaaggccaanaggctgttcccaccaggctgctcagggntggtcttttaggacccttcccttgagccctntatggtgtggcaaagccttcattgccttaactggagccccatcagctccagctgctctgtnttntttgcccncaatgctttgcccctgagacaaatggaggcctgtcctgacctgtctcaccatgtacatagctt

SEQ ID NO: 1776 - DNA, 550 bp, Homo sapiens
  modified_base (30)..(30): a, c, t, g, unknown or other
  modified_base (42)..(42): a, c, t, g, unknown or other
  modified_base (49)..(49): a, c, t, g, unknown or other
  modified_base (58)..(58): a, c, t, g, unknown or other
  modified_base (116)..(116): a, c, t, g, unknown or other
  modified_base (119)..(119): a, c, t, g, unknown or other
  modified_base (175)..(176): a, c, t, g, unknown or other
  modified_base (178)..(178): a, c, t, g, unknown or other
  modified_base (180)..(181): a, c, t, g, unknown or other
  modified_base (183)..(183): a, c, t, g, unknown or other
  modified_base (188)..(188): a, c, t, g, unknown or other
  modified_base (225)..(225): a, c, t, g, unknown or other
  modified_base (246)..(246): a, c, t, g, unknown or other
  modified_base (248)..(248): a, c, t, g, unknown or other
  modified_base (258)..(258): a, c, t, g, unknown or other
  modified_base (268)..(268): a, c, t, g, unknown or other
  modified_base (274)..(274): a, c, t, g, unknown or other
  modified_base (285)..(287): a, c, t, g, unknown or other
  modified_base (289)..(289): a, c, t, g, unknown or other
  modified_base (299)..(299): a, c, t, g, unknown or other
  modified_base (336)..(336): a, c, t, g, unknown or other
  modified_base (364)..(364): a, c, t, g, unknown or other
aagatcctggagtttgtggggcgctccctnccagaggagacngtggacntcatggttnagcacacgtcgttcaaggagatgaagaagaaccctatgaccaactacaccaccgtccnccnggagttcatggaccacagcatctcccccttcatgaggaaaggcatggctggggacnngngnngnccacnttcaccgtggcgcagaatgagcgcttcgatgcggacntatgcggagaagatggcaggncngcagcctcangcttccgctntgagcngtgagaggggnnncntggagtcacngcagagggagtgtgcgaatcaaacctgaccaagcggntcaagaataaaatatgaattgagggccngggacggtaggtcatgtctgtaatcccagcaatttggaggctgaggtgggaggatcatttgagcccaggagttcgagaccaacctgggcaacatagtgagattctgttaaaaaaataaaataaaataaaaccaatttttaaaaagagaataaaatatgattgtgggccaggcagagtggctcatgc

SEQ ID NO: 1777 - DNA, 485 bp, Homo sapiens
gaaaatggtttgccgctggagtatcaagagaagttaaaagcaatagaaccaaatgactatacaggaaaggtctcagaagaaattgaagacatcatcaaaaagggggaaacacaaactctttagaacataacagaatatatctaagggtattctatgtgctaatataaaatatttttaacacttgagaacagggatctgggggatctccacgtttgatccattttcagcagtgctctgaaggagtatcttacttgggtgattccttgtttttagactataaaaagaaactgggataggagttagacaatttaaaaggggtgtatgagggcctgaaatatgtgacaaatgaatgtgagtaccccttctatgaacactgaaagctattctcttgaattgatcttaagtgtctccttgctctggtaaaagatagatttgtagctcacttgatgatggtgctggtgaattgctctgctctgtctgagatt

SEQ ID NO: 1778 - DNA, 532 bp, Homo sapiens
gagggacactcatagtccctcctctctccctaggggccaaaccagtgctcctgccacctctctggctgccccctagagcctgcccatcccagcctgaccaatgtccacagccagggagcagccaatcttcagcacacgggcgcacgtgttccaaattgacccagccaccaagcgaaactggatcccagcgggcaagcacgcactcactgtctcctatttctacgatgccacccgcaatgtgtaccgcatcatcagcatcggaggcgccaaggccatcatcaacagcactgtcactcccaacatgaccttcaccaaaacttcccagaagttcgggcagtgggccgacagtcgcgccaacacagtctatggcctgggctttgcctctgaacagcatctgacacagtttgccgagaagttccaggaagtgaaggaagcagccaggctggccagggagaaatctcaggatggctggggtgggccccagtcggctctggttgttggcagctttggggctgtttttgagcttctcatt

SEQ ID NO: 1779 - DNA, 362 bp, Homo sapiens
  modified_base (80)..(80): a, c, t, g, unknown or other
tcctgcaggtatggtcagaacccagtgacctcctggagattccggtctcaggagcagctgataacctcagtccgtcacanaacaagtctgactctgggactgcctcacaccttcaggattacgcagtagagaatctcatccgcatgggcatggccggcttgatcctggtggtccttgggattctgatatttcaggattggcacagccagagaagcccccaagctgcagctggaaggtgaacagaagagagaacaatgcaccattgaatgctggagccttggaagcgaatctgatggtcctaggaggttcgggaagaccatctgaggcctatgccatctggactgtctgctggcaatttcttt

SEQ ID NO: 1780 - DNA, 435 bp, Homo sapiens
gccatgcgcaacctctatgcgatgcaccggcggctgcagcggcacccgcgctcctgcaccagggactgtgccgagccgcgcgcggacgggagggaagcgtcccctcagcccctggaggagctggatcacctcctgctgctggcgctgatgaccgtgctcttcactatgtgttctctgcccgtaatttatcgcgcttactatggagcatttaaggatgtcaaggagaaaaacaggacctctgaagaagcagaagacctccgagccttgcgatttctatctgtgatttcaattgtggacccttggatttttatcattttcagatctccagtatttcggatattttttcacaagattttcattagacctcttaggtacaggagccggtgcagcaattccactaacatggaatccagtctgtgacagtgtttttcactc

SEQ ID NO: 1781 - DNA, 540 bp, Homo sapiens
gctttctgcctgacacagttgtcgaagggcattttcagggagcagaatgacaagacctattgtcaaccttgcttcaataagctcttcccactgtaatgccaactgatccatagcctcttcagattccttataaaatttaaaccaagagaggagaggaaagggtaaattttctgttactgaccttctgcttaatagtcttatagaaaaaggaaaggtgatgagcaaataaaggaacttctagactttacatgactaggctgataatcttattttttaggcttctatacagttaattctataaattctctttctccctctcttctccaatcaagcacttggagttagatctaggtccttctatctcgtccctctacagatgtattttccacttgcataattcatgccaacactggttttcttaggtttctccattttcacctctagtgatggccctactcatatcttctctaatttggtcctgatacttgtttcttttcacgttttcccatttccctgtggctcactgtcttacaatcactg

SEQ ID NO: 1782 - DNA, 267 bp, Homo sapiens
ccaccctctggatcccaatattgagatcttatcctcagggaatcctcacttagacccctgtaacaggttaaatcttcatggtgttctgtttcctaggaacttctttcttttctactgtttatgacaactgaagttaataagtgtttatctttcccacctactcaaagtagttccaagattagggctagtttgtaattctgtggaccactgtaaacgagggcctagttcagtgtctgcctcatgggaagcttccaataaatacctttg

SEQ ID NO: 1783 - DNA, 509 bp, Homo sapiens
gtctctgaagtatttcctccagtttccctgcgggcccctatgtttgagtttgatggctgctggatcctcactcaacgaaaactcggttggaaactgttccgcctggcagtccttttttgttgttttccatctcatttcccttccatctgaaagtggcattcagctgacttgctcatttagactgttcacggagtctgaatctgccaacgtggtgttggaggctccaccttgaaaagggccacagtcagggcaactttccccatacaggaaaacttgaaaattacatcaacagtctacgtcacagccaaattatatttcctttataccaaacaaaactatggagaactaaaagtacatcacacaaaacgtttatagtgttttgcatgtgacctatttcagtatttatataactagattagtgctttctagcaaacggttctgttaattagcgagtcactgttgattctgctgtggtggtaagttgataccgtgtaactaatcccgtggat

SEQ ID NO: 1784 - DNA, 333 bp, Homo sapiens
gaaggtgaacatgatgtccctcacagtgcttgggctacgaatgctgtttgcaaagactgttgccgtcaattttctcttgactgccaagttatttttcttgtaaggctgactggcatgaggaagctacactcctgaagaaaccaaaggcttacaaaaatgcatctccttggcttctgacttctttgtgattcaagttgacctgtcatagccttgttaaaatggctgctagccaaaccactttttcttcaaagacaacaaacccagctcatcctccagcttgatgggaagacaaaagtcctggggaaggggggtttatgtcctaactgctttgta

SEQ ID NO: 1785 - DNA, 469 bp, Homo sapiens
tctcctttctcaccaatgggcaatagcccataattgaaataaatttctgattgaaaggtataggaaacattaaaatgcattactaagagaagtaatataattttcttacaaagtatttttcccaaagatagctttactatttcaaaaattgtcaaattaatgcatgctccttacaacaaacaaatatcaaaaagagtttaggaattctactagccagagatagtcacttggagaaactttctatatatccttctaaatatttttctgggcatgctcatgtatgtacatcagttgtttctttttattttgaaccaaaaatgtggtttcttttgtacacattacttaaactttctttccagtcaacaatatattgtggatttattttcactgttatatttaactatatataaatacgcatatattgtaattttaatgtctgcttagcaccccactgataaccaaatcacag

SEQ ID NO: 1786 - DNA, 250 bp, Homo sapiens
gggaccgctataaggccagtcggactgcgacatagcccatcccctcgaccgctcgcgtcgcatttggccgcctccctaccgctccaagcccagccctcagccatggcatgccccctggatcaggccattggcctcctcgtggccatcttccacaagtactccggcagggagggtgacaagcacaccctgagcaagaaggagctgaaggagctgatccagaaggagctcaccattggctcgaagctgcagg

SEQ ID NO: 1787 - DNA, 481 bp, Homo sapiens
aacattgtaatggccatcgctggaaacaagtgcgacctctcagatattagggaggttcccctgaaggatgctaaggaatacgctgaatccataggtgccatcgtggttgagacaagtgcaaaaaatgctattaatatcgaagagctctttcaaggaatcagccgccagatcccacccttggacccccatgaaaatggaaacaatggaacaatcaaagttgagaagccaaccatgcaagccagccgccggtgctgttgacccaagggcgtggtccacggtacttgaagaagccagagcccacatcctgtgcactgctgaaggaccctacgctcggtggcctggcacctcactttgagaagagtgagcacactggctttgcatcctggaaggcctgcagggggcggggcaggaaatgtacctgaaaaggattttagaaaaccctgggaaacccaccacaccaccacaaaatggcctttagtgt

SEQ ID NO: 1788 - DNA, 371 bp, Homo sapiens
gatcatcgacgccatcaggcaggagctgagtgggatcagcaccacgtaaggggccggcctcgctgcgctgattcgtcgagcccatccggcgacagaggacagccagaagcccagccagccccagactccagtgcaccagagcacgcacaggagcctgggcgcgctgctgtgaaacgtcctgacctgtgatcacacatgacagtgaggaaaccaagtgcaactcctgggtttttttagattctgcctgacacggaacaccaggtctgctcgtcttttttgtgttttatatttgcttatttaaggtacatttctttgggtttctagagacgcccctaagtcacctgcttcattagacggtttccaggttttct

SEQ ID NO: 1789 - DNA, 470 bp, Homo sapiens
ggtgtagtggctttttggctcagcatccagaaacaccaaaccaggctggctaaacaagtggccgcgtgtaaaaacagacagctctgagtcaaatctgggcccttccacaagggtcctctgaaccaagccccactcccttgctaggggtgaaagcattacagagagatggagccatctatccaagaagccttcactcaccttcactgctgctgttgcaactcggctgttctggactctgatgtgtgtggagggatggggaatagaacattgactgtgttgattaccttcactattcggccagcctgaccttttaataactttgtaaaaagcatgtatgtatttatagtgttttagatttttctaacttttatatcttaaaagcagagcacctgtttaagcattgtacccctattgttaaagatttgtgtcctctcattccctctcttcctcttgtaagtgcccttctaata

SEQ ID NO: 1790 - DNA, 438 bp, Homo sapiens
gagaggcacctcggagatctgggtgcaaaagcccagggttaggaaccgtagcatgctgcgccccaaggctttgacccaggtgctaagccaagccaacactggaggcgtccagagcaccctgctgctgaataacgagggatcactgctggcctactctggttacggggacactgacgcccgggtcaccgctgccatagccagtaacatctgggccgcctacgaccggaacgggaaccaagcgtttaatgaagacaatctcaaattcatcctcatggactgcatggagggccgtgtagccatcacccgagtggccaaccttctgctgtgtatgtatgccaaggagaccgtgggctttggaatgctcaaggccaaggcccaggctttggtgcagtacctggaggagcccctcacccaagtggcggcatcttaacggcattg

SEQ ID NO: 1791 - DNA, 235 bp, Homo sapiens
cctacaggagcgggagaagattgtggctcccatcagtgactccccgaagccaccgccacagcgtgtgaccctcacactacctgtcctgaatgcagcacgaactgtcatctttgtggcaactggagaaggcaaggcagctgttctgaagcgcattttggaggaccaggaggaaaacccgctgcccgccgccctggtccagccccacaccgggaaactgtgctggttcttggacgag

SEQ ID NO: 1792 - DNA, 548 bp, Homo sapiens
ctgccccgagctcgaagaagaggctgagtgcgtccctgataactgcgtctaagaccagagccccgcagcccctggggcccccggagccatggggtgtcgggggctcctgtgcaggctcatgctgcaggcggccgaggcacagggggtttcgcgctgctcctgaccgcggtgaggccgcgccgaccatctctgcactgaagggccctctggtggccggcacgggcattgggaaacagcctcctcctttcccaaccttgcttcttaggggcccccgtgtcccgtctgctctcagcctcctcctcctgcaggataaagtcatccccaaggctccagctactctaaattatggtctccttataagttattgctgctccaggagattgtccttcatcgtccaggggcctggctcccacgtggttgcagatacctcagacctggtgctctaggctgtgctgagcccactctcccgagggcgcatccaagcgggggccacttgagaagtgaataaatggggcggtttcggaagcgtcagtgtttccatgttatgg

SEQ ID NO: 1793 - DNA, 479 bp, Homo sapiens
ccagttgtggtcctcagcatttgaagcagctgcatacttcagagtaaactatttttcattatttagttttgtcacaagaaatcgaccattgtactactctcacttacagcagttaaacagcatagaactaaaaacctgtctgcatttccattttttctttctgtatggttgtgggttttaggacatagggggttaggagaaggggtttcttgatcatgtcatgaattctcctttgtcctgtttctcctgtttcatttctcctccgcctgctgtatattacctgagctggtgttgtatcttcaagtccatatgcgtatttgcagacctttcctgttcccactcttgttggctcttctgatttatgcacagatggttcccagcatgtgtccagtgcttcatggatgggaccatcccagcaactaatcagacttcctgccagtgtcctaacccccagggcaccctgttcaaccatatttaaa

SEQ ID NO: 1794 - DNA, 372 bp, Homo sapiens
caccaagacgactgcttcagcttcttctcttatccttactttctttaatagatatttattaaactgtccagtgaaaaggtgccacaatgcccagtattgtaaacaacaggtttgcattcatgaagctttcattcattctggagtctactaatttacctgaatggtgtttgcattctgtgaaatgcctctccacgttgcatatgtcacacttttgtctgcacataactcttttttcacaagaagggtcactgccacaacagcacagtcagcgggtgaattacaggtgcctgctgcctgcctacctgggtaatctgatcttgtctgtatcgccgtgtgctcatcactgaagaattgcaggccactcatgtcagt

SEQ ID NO: 1795 - DNA, 446 bp, Homo sapiens
gacccgcacacggagaagctggcgcccttcaacgagcactggcggcaggtgtaccgcctctgccacccgtgccagatcgactacgacttcgtggggaagctggagactctggacgaggacgccgcgcagctgctgcagctactccaggtggaccggcagctccgcttccccccgagctaccggaacaggaccgccagcagctgggaggaggactggttcgccaagatccccctggcctggaggcagcagctgtataaactctacgaggccgactttgttctcttcggctaccccaagcccgaaaacctcctccgagactgaaagctttcgcgttgctttttctcgcgtgcctggaacctgacgcacgcgcactccagtttttttatgacctacgattttgcaatctgggcttcttgttcactccactgcctctatccattgagtac

SEQ ID NO: 1796 - DNA, 466 bp, Homo sapiens
actggactggctgaaggacgacctctgcacagatcccaaggtccccttcagttggtcacaagaggaaatttctgacctgtacgatcacaccaccatcctgtttgcagccgaagtgttttacgacgacgacttgactgatgctgtgtttaaaacgctctcccgactcgcccacagattgaaaaatgcctgcacagccatactgtcggtggagaagaggctcaacttcacactgagacacttggacgtcacatgtgaagcctacgatcacttccgctcctgcctgcacgcgctggagcagctcacagatggcaagctgcgcttcgtggtggagcccgtggaggcctccttcccacagctcctggtttacgagcgcctccagcagctggagctctggaagatcatcgcagaaccagtaacatgacccatcgcctccaccaggcgcggcgtctcgactgttcttagagtg

SEQ ID NO: 1797 - DNA, 565 bp, Homo sapiens
ctcctgggccacaagggctactagactggaagaccaggaaagtgccatagacataatgtaactggatttcagcaaggcatttaacagagcctcttatgatatccttgtgaaccagatggagagatgtgggcttgaagccttcccattgcctacaggataaaattcaaacttcctagtgtggtgtacaagaccctttacagcccgcctctgtgtacccttcaacaccattctctgaaccaaccatgctcatgtttttacctcagtgcctttgcacatgctattccctctgcctggaatgccctgtgccccctctgccctctgccgtgctaaaatatcactcatccttaaacttcaaaatcaagtgccatctcttccttgttaccttcaggcagaattagttactctttcctctgtgcaattgttctatatcttcgctctagctcttttcctgttgtattgtaatgatttgtttatgtttaccttccttactagactgtgagctcaagagcaggccgtcttaattattcctttctgtacccctagtgtcttttatggttctcagccc

SEQ ID NO: 1798 - DNA, 497 bp, Homo sapiens
acaacgtctcgaactttctatgtgcaggctgatagccctgaagagatgcacagttggattaaagcagtctctggcgccattgtagcacagcggggtcccggcagatctgcgtcttctgagcatccccccggtccttcagaatccaaacacgctttccgtcctaccaacgcagccgccgccacctcacattccacagcctctcgcagcaactctttggtctcaacctttaccatggagaagcgaggattttacgagtctcttgccaaggtcaagccagggaacttcaaggtccagactgtctctccaagagaaccagcttccaaagtgactgaacaagctctgttaagacctcaaagtaaaaatggccctcaggaaaaagattgtgacctagtagacttggacgatgcgagccttccggtcagtgacgtgtgaggcagaagcgcacggagcctgcctgcctctgccgtcctcagttacctttcatgaggcttctagcc

SEQ ID NO: 1799 - DNA, 517 bp, Homo sapiens
tcttctagattctctctatgttggcagataatctccccttgtagcttccactcacttattcttgcattcagagtcacaatgatcatcttacccatgtggtttttgagaaagaaagatcaattctttgtttgcagtgggtaatcttagagatggagatgattgtagaattattcctagatgagtgtcaatttatttaattccattgtcatataaggagtcaaattgtttcttatcatttgttcattgaagaacagagacctgtctggaaaatcgatctctacaaattcaattaaataatgatccccaaatgctgaaaaagtgaaatacagcaattcaacagataatagagcaatgtttagtatattcagctgtatctgtagaaactctttgacgaacctcaatttaaccaatttgatgaatacccagttctcttcttttctagagaaagatagttgcaacctcacctccctcactcaacactttgaatacttattgtttggcaggtcatccacacact

SEQ ID NO: 1800 - DNA, 379 bp, Homo sapiens
ccagctactccggacactgatgtgagaggatcacttgagccagggaggtcatggctacagtgacccctcattgcaccactttacttagcctgggtgacagagtgagaccctatctcaaaaaaaaaaaaaatctatgcattgtatgggactttcctttggatcccccaatcaaaggataagcaatgcgtaagcctgtgtccttcctgaagcttctcgactgcccagatagggaggtgagtcctctctatctcctctggctctggaagcaccttgaaaatgtgcattttcaaggacacttgctgggttgtgcattaagggccagtttacttgtctgcctctttgaccacctgtgaactctgttgggtgtactctgctaagt

SEQ ID NO: 1801 - DNA, 520 bp, Homo sapiens
tgtgtttttgtgggggctcgaagcagtgactatggcctcctttgttcccatttcagggttccacaaactgtcttgcatgtgtgtgtgtgtctggttaccccgaccttctgtgaaggtgggtcttcctgaattaatttatctattccaaatgccttaacgagactctgtttctgggagtctgattttccacttacacatttcttccacctttcctgctagttcccactcccctgtgaccactggggcctcagggaagataaagaaagctgggcctgtcgaaggatgacagggatgtgctgccaggttgctatagaaacccaggctctgcctcttgcaccttgagggggtgggaggggctggtgtcctccctccaggctgaaccccacttcctcggcaggaccccagtctcagcagcctcctgatttcataaccaggccggaccacgtgcaatagggtggaaaccaaactgctccatgccgggttatttaaaagaaaggcagagtttgtggtggcttttttt

SEQ ID NO: 1802 - DNA, 529 bp, Homo sapiens
attgggcctgtcagcccgaatgggaatagaagtggtgatgaggcaagtattctttggagcaggaaactaccatttagtggatgaaaacttcgatcctttacctgattattggctatctcttctgttcaagaaattggtgggcaccaaggtgttaatggcaagcgtgcaaggttcaaagagaaggaagcttcgagtataccttcattgcacaaacactgacaatccaaggtataaagaaggagatttaactctgtatgccataaacctccataatgtcaccaagtacttgcggttaccctatcctttttctaacaagcaagtggataaataccttctaagacctttgggacctcatggattactttccaaatctgtccaactcaatggtctaactctaaagatggtggatgatcaaaccttgccacctttaatggaaaaacctctccggccaggaagttcactgggcttgccagctttctcatatagtttttttgtgataagaaatgccaaagttgctgcttgcatctga

SEQ ID NO: 1803 - DNA, 153 bp, Homo sapiens
acgccaagacagacacgctgcagatcgaggactttctggaggagacgctggggccgcccgacttccccagcctggcgcctcgttacagggagtccaacaccgccggcaacgacgttttccacaagttctccgcgttcatcaagaacccggtgc

SEQ ID NO: 1804 - DNA, 500 bp, Homo sapiens
ttggtaacaaacgccaccttacactctgcaggctgcagcggcagctccagatggcctcctgagctggacgaccccaggtctccagacatctagggaccagagcaggtttgggaacacagagggaagacaggatgggagtgtagccacagaacccacctgcaccctgacaggcacaccccactgaagagcctgagtcccaggaggcctcctggaagcccaggactgcccacccaccacgctggtgcccaccgcctggccagccaagccctgccgatcagacatgtgggctccccgaagcccagccagagactgccgtgctgtgggtgccaccaggcccagggactgcagcctgagctccccgaggcccagggcagccgggtgaggactctgtcctgtgtcacctctctccaggtgtccagctgtctcatgcctttttgtcctgtcctcagctctccgtgtggtcagcgaaaccattgttttctgttaggactcagttgcaa

SEQ ID NO: 1805 - DNA, 517 bp, Homo sapiens
taccccggaaccaagtacgagctgggccccgccctctacctggggtggagcgcctcactgatctccatcctgggtggcctctgcctctgctccgcctgctgctgcggctctgacgaggacccagccgccagcgcccggcggccctaccaggctcccgtgtccgtgatgcccgtcgccacctcggaccaagaaggcgacagcagctttggcaaatacggcagaaacgcctacgtgtagcagctctggcccgtgggccccgctgtcttcccactgccccaaggagaggggacctggccggggcccattcccctatagtaacctcaggggccggccacgccccgctcccgtagccccgccccggccacggccccgtgtcttgcactctcatggcccctccaggccaagaactgctcttgggaagtcgcatatctcccctctgaggctggatccctcatcttctgaccctgggttctgggctgtgaaggggacggtgtccccgcacgtttgtattgtgtat

SEQ ID NO: 1806 - DNA, 393 bp, Homo sapiens
gagaagttctacattgaccaggcccccttgttgcctggagtatgacgtaatcagaaaatagacgtataaatgtgcacatgcgtatgtatttgcttgtgaaattaaagtcacctcttgcctctgctttcctgatcattcgttagagaaatggatcaggcatttttttaaattattattctttctctaaactatttgcattgtgttcaaaaacccattttagaagtttgaacagcaagcttttcctgattttaaaaacacaaagttgctttcaatgaaatattttgtgatttttttaaagtccccaaatgtgtacttagccttctgttattccttattctttaagcagtgttggcttccattgaccatatgaaggccaccaattaaatggttgtg

SEQ ID NO: 1807 - DNA, 334 bp, Homo sapiens
gctttgtctctgttgagaatggactctacgctcaggcaggggagaggcctcctcacactggtcccggcctcactcttttccctgaccctcgggggcccagggccatggaaggacccttaggagttcgatgagagagaccatgaggccactgggctttccccctcccaggcctcctgggtgtcatccccttactttaattcttgggcctccaataagtgtcccataggtgtctggccaggcccacctgctgcggatgtggtctgtgtgcgtgtgtgggcacaggtgtgagtgtgtgagtgacagttaccccatttcagtcatttcctgctgcaac

SEQ ID NO: 1808 - DNA, 552 bp, Homo sapiens
gattgattgggcttcctcataggaagcactgagggtgtgtctttgtacttggttcattgcccttcacctggtagagaaagagaggtcagaaatagcaagcaaaaagcaggactcccaggagccacaagaaaagagcacaggctgcaccaaagcaggggcagcagagaataaaatatccctttgaacttgtcaacaattaaaaaactgcaaggagtcaccttataacactatttccagtaaaggtggaattgagtatcagagggattactgcggtgttaaggtagccctgccacgtggctctccaggcagggccaagaagacagcacaaagtatgggtttggccataagctcatatgctgcccccaaagactggggagagctgtgtgcctcagtgttgcagtgtgaattcctaaatagagggtaaagtgagcctagccaggaggtgtttggggctctatcgcgcatctctcctaccaagctgggcaagagcttttaggagattcatccagctttgtggatttagaaaggaagccttcagttccaatcagaatc

SEQ ID NO: 1809 - DNA, 489 bp, Homo sapiens
gatgctgatctctttattctttcaagtaagagtgctagtgaacaaattgtgttacttggccttgggattttttgaacgtttgtaaaatgctgtcttcctagtccaaacagctgcagctttgggcatttttctttttaattattcttcctctgactttgtatcccttaatacctacactctccaattgtaagagaaagggggcagggaagcaatatagcttccattctaaggctgtattcccgttatgaattactagctgattacagttcagagcattgatcctggaatgtgtgctggagaaatttaaaatactggggttttttgtttaatggtgcctatttagagttggaagttgaacagctgttgcattacatacttttgcttttttattgaaattttgaaatcaaacgtcttgatttttctgttctgttgaattgctatgttcaggatgttctagggggtgggggcagggactcttttcgtaataag

SEQ ID NO: 1810 - DNA, 357 bp, Homo sapiens
tggggtgcgatttccagatcttcccgtacaggttaccataccacagatcctgtccaggccactgcttcccaaggaagtgcgactaagcccatcagtgtatcagattatgtcccttatgtcaatgctgttgattcaaggtggagttcatatggcaacgaggccacatcatcagcacactatgttgaaagggacagattcattgttactgatttatctggtcatagaaagcattccagtactggggaccttttgagccttgaacttcagcaggccaagagcaactcattacttcttcagagagaggccaatgctttggccatgcaacagaagtggaattccctggatgaaggccgtcac

SEQ ID NO: 1811 - DNA, 501 bp, Homo sapiens
gatgagaaagacctgactgtgccccagcccgacacccataaagggtctgtgctgaggtggattagtaaaagaggaaagcctcttgcagttgagatagaggaaggccactgtctctgcctgcccctgggaactgaatgtctcggtataaaaccgattgtacatttgttcaattctgagataggagaaaaccgccctatggtgggagcgagacatgtttcgagcaatgctgccttgttattctttactccgctgagatgtttgggtggagagaaacataaatctggcctacatgcacatccgggcatagtaccttcccttgaacttaatcatgacacagattcttttgctcacatgttttttgctgaccttctccttattatcaccctgctgtcctactacattcctttttgctgaaataatgaaaataatagtcaataaaaactgagggaactcaaaggccggtgccagtgcaggtccttggtgtgtcgaatactggtcccc

SEQ ID NO: 1812 - DNA, 504 bp, Homo sapiens
acttcctgttgtcagttacatccgaaagtgtctggagaagctggacactgacatttcactcattcgctattttgtcactgaggtgctggacgtcattgctcctccttatacctctgacttcgtgcaacttttcctccccatcctggagaatgacagcatcgcaggtaccatcaaaacggaaggcgagcatgaccctgtgacggagtttatagctcactgcaaatctaacttcatcatggtgaactaatttagagcatcctccagagctgaagcagaacattccagaacccgttgtggaaaaaccctttcaagaagctgttttaagaggctcgggcagcgtcttgaaaatgggcaccgctgggaggaggtggatgacttctttacaaaggaaaatggcaggcgctgggctcccacgacccctcaggacagatctggccgtcagccgcgggccgctgggaactccactcggggaactcctttccaagctgacctcagttttctcac

SEQ ID NO: 1813 - DNA, 549 bp, Homo sapiens
atattcttcataaagggaccagctaaagaaaacagctgtgctgccattaaggaaagcaaaattttctctgaaacctgcagcagtgttttcaaatggatttgtcagtattagagtttgacaaaattcacagtgaaataatcaatgatcactatttttggcctattagtttctaatattaatctccaggtgtaagattttaaagtgcaattaaatgccaaaatctcttctcccttctccctccatcatcgacactggtctagcctcagagtaacccctgttaacaaactaaaatgtacacttcaaaatttttacgtgatagtataaaccaatgtgacttcatgtgatcatatccaggatttttattcgtcgcttattttatgccaaatgtgatcaaattatgcctgtttttctgtatcttgcgttttaaattcttaataaggtcctaaacaaaatttcttatatttctaatggttgaattataatgtgggtttatacattttttacccttttgtcaaagagaattaactttgtttccaggcttttgctact

SEQ ID NO: 1814 - DNA, 425 bp, Homo sapiens
tcctggcccacgatgaaacctgagaggggtgtccccttgccccatcctctgccctaactacagtcgtttacctggtgctgcgtcttgcttttggtttccagctggagaaaagaagacaagaaagtcttgggcatgaaggagctttttgcatctagtgggtgggaggggtcaggtgtgggacatgggagcaggagactccactttcttcctttgtacagtaactttcaaccttttcgttggcatgtgtgttaatccctgatccaaaaagaacaaatacacgtatgttataaccatcagcccgccagggtcagggaaaggactcacctgactttggacagctggcctgggctccccctgctcaaacacagtggggatcagagaaaaggggctggaaaggggggaatggcccacatctcaagaagcaa

SEQ ID NO: 1815 - DNA, 533 bp, Homo sapiens
agcccaaaggtttgcccgaatggagttaagggagcatggagaaaagaagaaacgctcgcgagaggatgctggagataatgatgacacagagggtgctattggtgtcaggaacaaggtggctggaggaaaaatgaagaagcggaaaggccgttaatcacttttatgaaggctcgagttctgctgttctgtaaaagagaattggagaatgaaacctgctccaacagagatcatgagactgaaattggtcagaattgtgtccagaatgtgctcagctaattcagtattcttccccattctgggttggagtttactgcagagtaattcttacagtgctgatgtcaagactgttactgttcttcgactttgattccttgctcatgacatgagtagggtgtgctcttctgtcacttcacacagaccttttgccttttttagctgcaagtcaaggactaggttgatgatgcccatgacctgtaattgtaaagaagcttggacatctgcaaatgatatttaaaccatcttggcttgtgctt

SEQ ID NO: 1816 - DNA, 514 bp, Homo sapiens
ttctcacttttcatccaggaagccgagaagagcaagaatcctcctgcaggctatttccaacagaaaatacttgaatatgaggaacagaagaaacagaagaaaccaagggaaaaaactgtgaaataagagctgtggtgaataagaatgactagagctacacaccatttctggacttcagcccctgccagtgtggcaggatcagcaaaactgtcagctcccaaaatccatatcctcactctgagtcttggtatccaggtattgcttcaaactggtgtctgagatttggatccctggtattgatttctcaggactttggagggctctgacaccatgctcacagaactgggctcagagctccattttttgcagaggtgacacaggtaggaaacagtagtacatgtgttgtagacacttggttagaagctgctgcaactgccctctcccatcattataacatcttcaacacagaacacactttgtggtcgaaaggctcagcctctctacatgaagtctg

SEQ ID NO: 1817 - DNA, 422 bp, Homo sapiens
gaatggcggcagtggagcatcgtcattcttcaggattgccctactggccctacctcacagctgaaactttaaaaaacaggatgggccaccagccacctcctccaactcaacaacattctataattgataactccctgagcctcaagacaccttccgagtgtgtgctctatccccttccaccctcagcggatgataatctcaagacacctcccgagtgtctgctcactccccttccaccctcagctctaccctcagcggatgataatctcaagacacctgccgagtgcctgctctatccccttccaccctcagcggatgataatctcaagacacctcccgagtgtctgctcactccccttccaccctcagctccaccctcagcggatgataatctcaagacacctcctgagtgtgtctgctca

SEQ ID NO: 1818 - DNA, 369 bp, Homo sapiens
ctggatgcgctggagaacctgaccgccgaggagctcaagaagttcaagctgcaggcggccacgcaccagggctctggagccgcgccagctgggatccaggcccctcctcagtcggcagccaagccaggcctgcactttatagaccagcaccgggctgcgcttatcgcgagggtcacaaacgttgagtggctgctggatgctctgtacgggaaggtcctgacggatgagcagtaccaggcagtgcgggccgagcccaccaacccaagcaagatgcggaagctcttcagtttcacaccagcctggaactggacctgcaaggacttgctcctccaggccctaagggagtcccagtcctacctggtggaggac

SEQ ID NO: 1819 - DNA, 533 bp, Homo sapiens
gcgcagcatggaggactttgtcacttgggtggactcgtccaagatcaagcggcacgtgctagagtacaatgaggagcgcgatgacttcgatctggaagcctagcggatctcccactttgcatggctgtcttttacagatgggaaaactgaggcctgatgctggagattctatgagggtgctctcctcaagggtatcagacggtcgtaggttcttaagaatttgattcatcagtggcaggccatgcatagagccacgggaggtgcgtccttgttttccaggaaatgttcttagaacttggactactgattattaattgactgtgccttgggaaacagtgggaagtaacttggtgcagcactggggtattgttggactggttcaattcgtttaactcgaattcttgctcctggccgtggttaagctgtgtacagatgatggagagtttggcctcaagtttttataaactgagcgagactagtgttcaggatctcctcccttgtttaaatgtcaataaatgccccaactgctttgt

SEQ ID NO: 1820 - DNA, 552 bp, Homo sapiens
  modified_base (63)..(63): a, c, t, g, unknown or other
  modified_base (72)..(72): a, c, t, g, unknown or other
  modified_base (74)..(74): a, c, t, g, unknown or other
  modified_base (85)..(85): a, c, t, g, unknown or other
  modified_base (138)..(138): a, c, t, g, unknown or other
tttcagcaccgatggccatgtaaataagatgatttaatgttgattttaatcctgtatataaantaaaaagtncncaatgagtttngggcatatttaatgatgattatggagccttagaggtctttaatcattggttcnggctgcttttatgtagtttaggctggaaatggtttcacttgctctttgactgtcagcaagactgaagatggcttttcctggacagctagaaaacacaaaatcttgtaggtcattgcacctatctcagccataggtgcagtttgcttctacatgatgctaaaggctgcgaatgggatcctgatggaactaaggactccaatgtcgaactcttctttgctgcattcctttttcttcacttacaagaaaggcctgaatggaggacttttctgtaaccaggaacattttttaggggtcaaagtgctaataattaactcaaccaggtctactttttaatggctttcataacactaactcataaggttaccgatcaatgcatttcatacggatatagacctagggctctggagggtgggg

SEQ ID NO: 1821 - DNA, 450 bp, Homo sapiens
  modified_base (41)..(41): a, c, t, g, unknown or other
  modified_base (56)..(58): a, c, t, g, unknown or other
  modified_base (63)..(63): a, c, t, g, unknown or other
  modified_base (68)..(68): a, c, t, g, unknown or other
  modified_base (70)..(71): a, c, t, g, unknown or other
  modified_base (78)..(78): a, c, t, g, unknown or other
  modified_base (86)..(88): a, c, t, g, unknown or other
  modified_base (91)..(91): a, c, t, g, unknown or other
  modified_base (106)..(106): a, c, t, g, unknown or other
  modified_base (114)..(114): a, c, t, g, unknown or other
  modified_base (116)..(117): a, c, t, g, unknown or other
  modified_base (119)..(119): a, c, t, g, unknown or other
  modified_base (128)..(129): a, c, t, g, unknown or other
  modified_base (132)..(146): a, c, t, g, unknown or other
  modified_base (161)..(218): a, c, t, g, unknown or other
tccttgcagccatgctcctgggcaacccaggtctggtcttntctcgtctgagcccnnngtacnacgancnngcaagancccacctnnntgntgaggagaaatcctngcccgtgncnngnccaggaggnnccnnnnnnnnnnnnnnngaccaaaacacaggnnnnnnnnnnnnnnnnnnnnnnnnnnnnnnnnnnnnnnnnnnnnnnnnnnnnnnnnnnggataagcccacccagagaagtgtttccaatgctgcgacccgggtgtgtaggacggggaggtcacgatggcgcgacgtctgcagaaatttcatgaggaggtatcagtctagagttacccagggcctcgtggccggagaaactgcccagcagatctgtgaggacctcaggttgtgtataccttctacaggtcccctctgagccctctcaccttgtcctgtggaagaagcacag

SEQ ID NO: 1822 - DNA, 374 bp, Homo sapiens
cctcatctggtggacggctgcctgccagctgctcgccagccttttcggcctctacttccaccagcacttggcaggctcctagctgcctgcagaccctcctggggccctgaggtctgttcctggggcagcgggacactagcctgccccctctgtttgcgcccccgtgtccccagctgcaaggtggggccggactccccggcgttcccttcaccacagtgcctgacccgcggccccccttggacgccgagtttctgcctcagaactgtctctcctgggcccagcagcatgagggtcccgaggccattgtctccgaagcgtatgtgccaggtttgagtggcgagggtgatgctggctgctcttctgaacaaataaag
